(19) United States
(12) Patent Application Publication
(10) Pub. No.: US 2025/0375525 A1
(43) Pub. Date: Dec. 11, 2025

(54) USE OF INDOCYANINE GREEN IN ANTIBACTERIAL OR BACTERICIDAL APPLICATION

(71) Applicant: Buddhist Tzu Chi Medical Foundation, Hualien (TW)

(72) Inventors: Jong-Kai Hsiao, New Taipei City (TW); Meng-Xian Lin, Yilan County (TW); Hsiang-Ching Tseng, New Taipei City (TW)

(21) Appl. No.: 18/954,506

(22) Filed: Nov. 20, 2024

(30) Foreign Application Priority Data
Jun. 5, 2024 (TW) 113120724

(51) Int. Cl. A61K 41/00; A61P 31/04

(52) U.S. Cl. CPC A61K 41/008; A61P 31/04

(57) ABSTRACT

Infection of a Gram-negative bacterium causes adverse effects on human health and biological experiments. Accordingly, a use of indocyanine green for resisting the Gram-negative bacterium or sterilizing the Gram-negative bacterium is provided. The indocyanine green can also be used with photodynamic therapy to bring about better antibacterial or bactericidal effects.

### CROSS REFERENCE TO RELATED APPLICATION

[0001] This application claims the benefit of TW application No. 113120724, filed on Jun. 5, 2024. The content of the application is incorporated herein by reference.

[0002] The present application hereby incorporates by reference the entire contents of the text file named “TZC-P0004-USA-Sequence Listing.xml” in XML format. The text file containing the Sequencing Listing of the present application was created on Jun. 27, 2024 and is 1,778,044 bytes in size.

### BACKGROUND OF THE INVENTION

### 1. Field of the Invention

[0003] The present disclosure relates to antibacterial or bactericidal technology, particularly to the use of indocyanine green for resisting or sterilizing a bacterium.

### 2. Description of the Prior Art

[0004] Infections pose a serious threat to human health. Studies indicate that in 2019, approximately 7.7 million people worldwide died from bacterial infections, accounting for 13.6% of the total deaths. Gram-negative bacteria commonly cause disease in humans. For example, mycoplasma may cause any degree of respiratory symptoms, in which mycoplasma pneumonia is one of the most common manifestations of the infection. Clinically, patients initially experience symptoms such as headache, fever, sore throat, and general weakness. Two to five days later, they develop cough and sputum, and then even white sticky sputum or purulent sputum with blood streaks. The above symptoms may last for three to four weeks and may occur with other symptoms such as chills, sore throat, earache, vomiting, conjunctivitis, and skin rash. Antibiotics mainly treat mycoplasma pneumonia to alleviate symptoms and slow down the condition, but they cannot change the infectivity of bacteria. Therefore, mycoplasma pneumonia is still infectious during or after treatment. The illness, especially cough, can last for weeks. In addition to causing pneumonia, mycoplasma can also cause genitourinary tract infections and pelvic inflammatory diseases. Moreover, mycoplasma contamination, which is common during biological experiments, often leads to experimental failure and is quite detrimental to research progress.

[0005] Although mycoplasma infection causes many problems, general antibiotics (such as penicillins or β-lactam antibiotics) cannot exert a bactericidal effect on mycoplasma that does not have a cell wall. Also, antibiotic treatment may cause drug resistance problems.

[0006] Therefore, there is an unmet need in the art for methods of effectively combating or killing Gram-negative bacteria without causing drug resistance problems.

### SUMMARY OF THE INVENTION

[0007] In view of the foregoing, the present disclosure provides a use of indocyanine green for resisting or sterilizing a bacterium which is a Gram-negative bacterium.

[0008] The present disclosure will no doubt become obvious to those of ordinary skill in the art after reading the following detailed description of the embodiments that is illustrated in the various figures and drawings.

### BRIEF DESCRIPTION OF THE DRAWINGS

[0009] The patent or application file contains at least one drawing executed in color. Copies of this patent or patent application publication with color drawing(s) will be provided by the Office upon request and payment of the necessary fee.

[0010] FIG. 1 shows the distribution changes of mycoplasma in human embryonic kidney cells 293 (HEK293 cells) observed by DAPI staining before and after light treatment with indocyanine green (ICG) in accordance with at least one embodiment of the present disclosure. After HEK293 cells are treated with 50 μg/mL ICG and irradiated with near-infrared light excitation, the distribution of mycoplasma in each group was observed by DAPI staining (the red arrow indicates the expression position of mycoplasma). CTL: control group; −Laser: not excited by laser; +Laser: excited by laser.

[0011] FIG. 2 shows the level changes of mycoplasma DNA in HEK293 cells analyzed by RT-PCR before and after light treatment with ICG in accordance with at least one embodiment of the present disclosure. (A) After HEK293 cells are treated with 50 μg/mL ICG and irradiated with near-infrared light excitation, the expression level of mycoplasma DNA in each group was observed by RT-PCR and DNA electrophoresis. (B) Results of DNA electrophoresis were quantitated by the Image J software (p-value: *<0.05, **<0.01, and ***<0.001).

[0012] FIG. 3 shows the distribution changes of mycoplasma in fibrosarcoma HT1080-1B3 cells observed by DAPI staining before and after light treatment with ICG in accordance with at least one embodiment of the present disclosure. After HT1080-1B3 cells are treated with 50 μg/mL ICG and irradiated with near-infrared light excitation, the distribution of mycoplasma in each group was observed by DAPI staining (the red arrow indicates the expression position of mycoplasma). CTL: control group; −Laser: not excited by laser; +Laser: excited by laser.

[0013] FIG. 4 shows the level changes of mycoplasma DNA in HT1080-1B3 cells analyzed by RT-PCR before and after light treatment with ICG in accordance with at least one embodiment of the present disclosure. (A) After HEK293 cells are treated with 50 μg/mL ICG and irradiated with near-infrared light excitation, the expression level of mycoplasma DNA in each group was observed by RT-PCR and DNA electrophoresis. (B) Results of DNA electrophoresis were quantitated by the Image J software (p-value: *<0.05, **<0.01, and ***<0.001).

### DETAILED DESCRIPTION

[0014] The following embodiments are provided to illustrate the present disclosure in detail. A person having ordinary skills in the art can easily understand the advantages and effects of the present disclosure after reading the specification of the present disclosure, and also can implement or apply that in other different embodiments. Therefore, it is possible to modify and/or alter the following embodiments for carrying out this disclosure without contravening its scope for different aspects and applications, and any element or method within the scope of the present disclosure disclosed herein can combine with any other element or method disclosed in any embodiments of the present disclosure.

[0015] The proportional probabilities, positions, quantities, and other features shown in the drawings attached hereto are only used to illustrate the embodiments described herein and are for a person having ordinary skill in the art to read and understand this disclosure, rather than to limit the scope of the present disclosure. Therefore, without affecting the purpose and effects that can be achieved by the present disclosure, any changes, modifications, or adjustments to the above features should fall within the scope of the technical content disclosed herein.

[0016] As used herein, the articles “a”, “an”, and “the” are used herein to refer to one or more than one (i.e., to at least one) of the grammatical object of the article, including plural referents unless expressly and unequivocally limited to one referent. The term “or” is used interchangeably with the term “and/or” unless the context clearly indicates otherwise.

[0017] As used herein, the term “about” is used herein to mean within the typical ranges of tolerances in the art. For example, “about” can be understood as about 2 standard deviations from the mean. When “about” is present before a series of numbers or a range, it is understood that “about” can modify each of the numbers in the series or range. For example, the numerical value is meant to encompass variations of ±20%, ±10%, ±5%, ±1%, ±0.5%, or =0.1% from the numerical value.

[0018] As used herein, the numeral ranges are inclusive and combinable, any numeral value that falls within the numeral scope herein could be taken as a maximum or minimum value to derive the sub-ranges therefrom. For example, it should be understood that the numeral range “700 nm to 1400 nm” comprises any sub-ranges between the minimum value of 700 nm to the maximum value of 1400 nm, such as the sub-ranges from 700 nm to 900 nm, from 800 nm to 1400 nm, and from 800 nm to 900 nm. Such variations in the numerical value may occur by, e.g., the experimental error, the typical error in measuring or handling procedure for making compounds, compositions, concentrates, or formulations, the differences in the source, manufacture, or purity of starting materials or ingredients used in the present disclosure, or like considerations. In addition, a plurality of numeral values used herein can be optionally selected as maximum and minimum values to derive numerical ranges; for instance, the numerical ranges of 700 nm to 800 nm, 700 nm to 900 nm, or 800 nm to 900 nm can be derived from the numeral values of 700 nm, 800 nm, and 900 nm.

[0019] As used herein, the terms “comprise,” “comprising,” “include,” “including,” “have,” “having,” “contain,” “containing,” and any other variations thereof are intended to cover a non-exclusive inclusion. For example, when describing an object “comprises” a limitation, unless otherwise specified, it may additionally include other ingredients, elements, components, structures, regions, parts, devices, systems, steps, or connections, etc., and should not exclude other limitations.

[0020] As used herein, the term “effective amount” refers to a sufficient amount of an active ingredient to provide an antibacterial or bactericidal effect with a reasonable beneficial-harmful ratio. Within the scope of appropriate medical judgment, the amount and proportion of the active ingredient will depend upon the condition of the affected area, the extent of the symptoms, the cause of the disease, the duration of treatment, the specific active ingredient present, the concentration, the method of administration, or the patient's overall condition. These may vary depending on factors such as the condition, the individual's tolerance to the administration, and other drugs being administered to the individual.

[0021] As used herein, the term “administering” or “administration” refers to the placement of an active ingredient into a subject part or cell by a method or route that results in at least partial localization of the active ingredient at a desired site to produce the desired effect. In some embodiments, the active ingredient described herein can be administered by any suitable route known in the art, such as, but not limited to, topical administration to the skin of a subject or addition to a cell culture environment.

[0022] As used herein, the term “subject” refers to a human or other animal. Examples of the subject include, but are not limited to, human, monkey, mouse, rat, woodchuck, ferret, rabbit, hamster, cow, horse, pig, deer, dog, cat, fox, wolf, chicken, emu, and ostrich. In at least one embodiment of the present disclosure, the subject is a mammal, e.g., a primate such as a human.

[0023] As described in this article, the term “photodynamic therapy” refers to photochemical therapy, which is based on the induction of oxygen by photosensitizers to produce reactive oxygen species, which have a killing effect on tumor cells or pathogenic microorganisms to achieve the purpose of treating diseases.

[0024] As used herein, “HT1080-1B3 cells” refer to fibrosarcoma cells transfected with the SLCO1B3 gene. Compared to human embryonic kidney cells HEK293, HT1080-1B3 cells consistently overexpress the OATP1B3 transport protein (transcribed from the SLCO1B3 gene), and ICG is the substrate of the OATP1B3 transport protein. Therefore, compared with HEK293 cells, HT1080-1B3 cells can ingest more ICG.

[0025] As used herein, the term “Gram-negative bacterium” refers to bacteria that do not retain crystal violet dye in Gram staining protocols, including but not limited to: Enterobacteriaceae, such as but not limited to: Escherichia (including E. coli), Klebsiella, Enterobacter, Citrobacter, Salmonella or Shigella; Yersiniaceae, such as but not limited to: Serratia; Morganellaceae, such as but not limited to: Proteus or Providencia, Pseudomonadaceae, such as but not limited to: Pseudomonas (including Pseudomonas aeruginosa); Moraxellaceae, such as but not limited to: Moraxella (including M.catarrhalis); Pasteurellaceae, such as but not limited to: Haemophilus; Neisseriaceae, such as but not limited to: Neisseria; Mycoplasmataceae, such as but not limited to: Mycoplasma.

[0026] As used herein, the term “mycoplasma” is the smallest prokaryotic organism between independent life and intracellular parasitic life, and has no cell wall structure. Its structure is similar to that of typical bacteria and belongs to the Bacteria domain. It has no cell wall, and thus presents as Gram-negative. Its shape is easy to change and is sensitive to osmotic pressure, but is not sensitive to antibiotics that inhibit cell wall synthesis. In the present disclosure, the abbreviation M. preceding the species name represents Mesomycoplasma or Mycoplasma.

[0027] As used herein, the term “bacterial infection” refers to infection by bacteria and includes systemic infections (bacteremia and sepsis) and/or infection of any organ or tissue of the body. Such organs or tissues include, but are not limited to, skeletal muscle, skin, bloodstream, kidneys, heart, lungs, and bones. Such infections can be caused by Gram-negative bacteria as described herein.

[0028] As described herein, the term “sterilizing,” or “bactericidal” means the killing of microorganisms; the term “antibacterial” means the effect of inhibiting and slowing down the growth and proliferation of microorganisms, the effect of preservatives, and/or the effect of extending the validity period. In some embodiments, the microorganisms include, but are not limited to, bacteria, viruses, mold, algae, and/or fungi. In some embodiments, “sterilizing,” “bactericidal,” or “antibacterial” effect may be directed against microorganisms in materials, surfaces, environments, culture media, or individuals. In some embodiments, “sterilizing,” “bactericidal,” or “antibacterial” may be directed to specific one or more microorganisms, but not all microorganisms.

[0029] In at least one embodiment of the present disclosure, the use of indocyanine green for resisting or sterilizing a bacterium may include irradiating the indocyanine green and/or the Gram-negative bacteria with near-infrared light.

[0030] In at least one embodiment of the present disclosure, the near-infrared light may have a wavelength of about 700 nm to about 1400 nm, such as but not limited to: about 750 nm to about 1100 nm, about 800 nm to about 1000 nm, or about 850 nm to about 900 nm. In some embodiments, the near-infrared light may have a wavelength of about 700 nm, 710 nm, 720 nm, 730 nm, 740 nm, 750 nm, 760 nm, 770 nm, 780 nm, 790 nm, 800 nm, 810 nm, 820 nm, 830 nm, 840 nm, 850 nm, 860 nm, 870 nm, 880 nm, 890 nm, 900 nm, 910 nm, 920 nm, 930 nm, 940 nm, 950 nm, 960 nm, 970 nm, 1000 nm, 1100 nm, 1200 nm, 1300 nm, 1310 nm, 1320 nm, 1330 nm, 1340 nm, 1350 nm, 1360 nm, 1370 nm, 1380 nm, or 1390 nm, but the present disclosure is not limited thereto.

[0031] In at least one embodiment of the present disclosure, the indocyanine green may emit about 800 nm to about 850 nm (for example, but not limited to: about 805 nm, 810 nm, 820 nm, 825 nm, 830 nm, 835 nm, 840 nm, or 845 nm) of red fluorescence, after being excited by near-infrared light with a wavelengths from about 700 nm to about 1400 nm.

[0032] In at least one embodiment of the present disclosure, the Gram-negative bacterium may be free of a cell wall.

[0033] In at least one embodiment of the present disclosure, the Gram-negative bacterium may be a Mycoplasmatota.

[0034] In at least one embodiment of the present disclosure, the Gram-negative bacterium may be a Mollicutes.

[0035] In at least one embodiment of the present disclosure, the Gram-negative bacterium may be a Mycoplasmatales.

[0036] In at least one embodiment of the present disclosure, the Gram-negative bacterium may be a Mycoplasmataceae.

[0037] In at least one embodiment of the present disclosure, the Gram-negative bacterium may be a Mycoplasma.

[0038] In at least one embodiment of the present disclosure, the mycoplasma may be M. genitalium, a M. fermentans, a M. salivarium, a M. hominis, a M. pneumonia, a M. incognitus, a M. penetrans, a M. pirum, a M. faucium, a M. lipophilum, a M. buccale, a M. cloacale, a M. gallinarum, a M. gallisepticum, a M. gallopavonis, a M. glycophilum, a M. iners, a M. iowae, a M. lipofaciens, aM. meleagridis, a M. synoviae, a M. flocculare, a M. hyopneumoniae, a M. hyorhinis, a M. hyosynoviae, a M. capricolum subsp. capricolum, a M. capricolum subsp. capripneumoniae, a M. mycoides subsp. mycoides LC, a M. mycoides subsp. capri, a M. bovis, a M. bovoculi, a M. canis, a M. californicum, a M. dispar, a mycoplasma unnamed species 1654_15 chromosome, or any combination thereof.

[0039] In some embodiments, the mycoplasma may be a M. hyorhinis or a mycoplasma unnamed species 1654_15 chromosome.

[0040] In at least one embodiment of the present disclosure, the genome of mycoplasma is about 0.48 to about 1.38 million bases (for example, but not limited to: 0.5, 0.55, 0.58, 0.59, 0.6, 0.65, 0.70, 0.75, 0.80, 0.84, 0.85, 0.90, 0.91, 0.92, 0.93, 0.94, 0.95, 1.0, 1.05, 1.1, 1.15, 1.2, 1.25, 1.3, or 1.35 million bases).

[0041] In at least one embodiment of the present disclosure, the use of indocyanine green for resisting or sterilizing a bacterium may include administering to a subject in need thereof or a cell in need thereof an effective amount of the indocyanine green. In at least one embodiment of the present disclosure, the use of indocyanine green for resisting or sterilizing a bacterium may include administering to a subject in need thereof or a cell in need thereof an effective amount of the indocyanine green and irradiating the indocyanine green with near-infrared light excitation. In some embodiments, the effective amount may be about 5 μg/mL to about 100 μg/mL, such as but not limited to: about 10 μg/mL to about 90 μg/mL, about 20 μg/mL to about 80 μg/mL, or about 40 μg/mL to about 70 μg/mL. In some embodiments, the effective amount may be about 5 μg/mL, 10 μg/mL, 15 μg/mL, 20 μg/mL, 25 μg/mL, 30 μg/mL, 35 μg/mL, 40 μg/mL, 45 μg/mL, 50 μg/mL, 55 μg/mL, 60 μg/mL, 65 μg/mL, 70 μg/mL, 75 μg/mL, 80 μg/mL, 85 μg/mL, 90 μg/mL, 95 μg/mL, or 100 μg/mL.

[0042] In at least one embodiment of the present disclosure, the indocyanine green enters the cell with the assistance of the OATP1B3 transport protein.

[0043] In at least one embodiment of the present disclosure, the use of indocyanine green for resisting or sterilizing a bacterium may include photodynamic therapy. In some embodiments, compared to other bacteria, the indocyanine green has a better antibacterial or bactericidal effect against the Gram-negative bacterium. For example, the indocyanine green can reduce the distribution of mycoplasma and the level expression of mycoplasma DNA after exciting irradiation with near-infrared light without the need for any antibiotic assistance, and thus can provide a novel therapeutic strategy for the clinical treatment of infections.

[0044] In at least one embodiment of the present disclosure, the use of indocyanine green for resisting or sterilizing a bacterium may also be administered in combination with antibiotics to maintain and enhance the antibacterial or bactericidal effect of photodynamic therapy. In some embodiments, the dosage of antibiotics may be reduced due to the excellent antibacterial or bactericidal effect produced by photodynamic therapy.

### EXAMPLE

[0045] Exemplary embodiments of the present disclosure are further described in the following examples, which should not be construed to limit the scope of the present disclosure.

### Materials and Methods

[0046] Indocyanine green, also known as Diagnogreen or indocyanine green (ICG), was purchased from Daiichi Sankyo Taiwan Ltd. Fibrosarcoma cells HT1080-1B3 and human embryonic kidney cells HEK293 transfected with SLCO1B3 gene were obtained from the laboratory of Dr. HSIAO, JONG-KAI of Buddhist Foundation Taipei Tzu Chi Hospital. The cell culture materials include cell culture medium DMEM and DMEM-high glucose, fetal bovine serum (FBS), penicillin-streptomycin, and 0.05% trypsin-EDTA, and all the materials were purchased from GIBCO of the United States. 4′,6-diamidino-2-phenylindole (DAPI) dye and KAPA rapid extraction kit were purchased from Sigma-Aldrich, and e-Myco™ VALID Mycoplasma PCR detection kit was purchased from iNtRON Biotechnology.

### Cell Culture

[0047] HT1080-1B3 cells were cultured in a DMEM-high glucose culture medium containing 10% FBS, mycoplasma, and 1% penicillin-streptomycin. HEK293 cells were cultured in a DMEM medium containing 10% FBS and 1% penicillin-streptomycin. When cell subculture was performed, the cells were firstly washed with phosphate buffer solution (PBS) and reacted with 0.05% trypsin-EDTA at 37° C. for 5 minutes to remove cells from the culture dish. Then, the culture medium was used to terminate the trypsin-EDTA reaction, and centrifugation (revolutions per minute was 1200 rpm, and time was maintained for 5 minutes) was performed. Finally, the supernatant was removed and fresh culture medium was added to reconstitute cell pellets, and then reseeded on various culture dishes according to experimental needs.

### DAPI Staining

[0048] First, HT1080-1B3 and HEK293 cells were collected through trypsin-EDTA reaction and then seeded into a six-well plate at a cell number of 3×10⁵ cells/well. The next day, a working concentration of 50 μg/mL of ICG was added to each well, and the reaction took place in the dark at 37° C. for 1 hour. After the reaction was completed, the cells were irradiated with near-infrared light of 780 nm wavelength for 10 minutes. The supernatant was removed, and the cells were washed twice with PBS. Then, a working concentration of 1 μg/ml DAPI was added to each well, and the reaction took place in the dark at room temperature for 15 minutes. Finally, washed twice with PBS, and the quantitative changes of stained mycoplasma chromosomes were observed under the UV light mode of an inverted fluorescence microscope (Nikon).

### RT-PCR

[0049] HT1080-1B3 and HEK293 cells were collected through trypsin-EDTA reaction and then seeded into a six-well plate at a cell number of 3×10⁵ cells/well. The next day, a working concentration of 50 μg/mL of ICG was added to each well, and the reaction took place in the dark at 37° C. for 1 hour. After the reaction was completed, the cells were irradiated with near-infrared light of 780 nm wavelength for 10 minutes, the supernatant was removed, and the cells were washed twice with PBS. Then, the cells were collected into a 1.5 mL test tube with trypsin-EDTA, 100 μL KAPA rapid extraction buffer was added to the test tube, and the test tube was placed in a dry bath at 75° C. for 10 minutes and at 95° C. for 5 minutes. Then, DNA samples were prepared according to the operating manual of the e-Myco™ VALID Mycoplasma PCR detection kit, and PCR reaction was performed by PCR instrument (Applied Biosystems) under setting conditions (30 cycles: 95° C./3 minutes, 95° C./15 seconds, 55° C./15 seconds, 72° C./20 seconds and 72° C./1 minute). Finally, DNA electrophoresis (2% agarose, 100 V, 40 minutes) was performed and observed by the electrophoresis gel UV image capture system (Clubio).

### RNA-Seq Materials and Methods

[0050] Regarding RNA preparation and quality control, total RNA was prepared by silica gel column chromatography. The RNA sample was connected to the silica gel column, treated with DNase I, and washed thoroughly before elution. ND-1000 spectrophotometer and Agilent 2100 Bioanalyzer were used, and RNA 6000 Nano assay was used to determine RIN value (the RIN value is the standard of measurement of RNA degradation quality) based on the above steps to detect quality and the quantity of purified RNA.

[0051] rRNA-dep RNA library construction and sequencing: aliquots of 1,000 ng RNA were input into Illumina TruSeq standard total RNA and Ribo-Zero library preparation workflow according to the manufacturer's operating manual (Illumina, Cat #20020598). The quality and quantity of the rRNA-dep RNA library were confirmed by the Agilent TapeStation 4200 system with D1000 ScreenTape detection. Multiple RNA libraries were mixed, and the multiple RNA libraries were performed sequencing by Novaseq 6000 sequencer with 2×150 paired-end sequencing protocol. Sequencing data (FASTQ format) was generated using Illumina's base calling program bcl2fastq. Adapter and quality splicing were performed via Trimmomatics.

[0052] Data analysis: sequencing data was compared with the GRCh38 human reference genome via HISAT2 aligner, and mycoplasma sequences were obtained by comparative analysis of the genomes of species whose sequences cannot be compared with the human genome. Differential performance analysis was performed using StringTie and DEseq with genomic bias detection/correction and Welgene Biotech's in-house production line. Functional enrichment test of genes with different expressions in individual experimental designs is performed using clusterProfiler.

### Example 1

[0053] After administering ICG and near-infrared light (780 nm) excitation and irradiation to HEK293 cells and HT-1080-1B3 cells, observing the cell survival rates of different concentration groups by MTT analysis. The results show that ICG and near-infrared light excitation and irradiation have no negative impact on cells (not shown in Drawings).

### Example 2

[0054] As shown in FIG. 1, it is observed by DAPI staining that the number of mycoplasma bacteria (red arrow) is significantly reduced after administration of ICG and near-infrared light excitation irradiation (50 μg/mL ICG+780 nm laser) to HEK293 cells. As shown in FIG. 2, administration of ICG and near-infrared light excitation irradiation (50 μg/mL ICG+780 nm laser) to HEK293 cells can significantly reduce the expression level of mycoplasma DNA.

### Example 3

[0055] As shown in FIG. 3, it is observed by DAPI staining that the number of mycoplasma bacteria (red arrow) disappears after administration of ICG and near-infrared light excitation irradiation (50 μg/mL indocyanine green+780 nm laser) to HT-1080-1B3 cells. As shown in FIG. 4, after administration of ICG and near-infrared light excitation irradiation (50 μg/mL indocyanine green+780 nm laser) to HT-1080-1B3 cells, no expression level of mycoplasma DNA was observed.

[0056] It can be seen from the results of Example 2 and Example 3 that ICG and near-infrared light excitation and irradiation exhibit excellent antibacterial or bactericidal effects on different cell lines. However, the effects on HT1080-1B3 cells is better than that in HEK293 cells since HT1080-1B3 cells, which continue to overexpress the OATP1B3 transport protein (ICG is the substrate of the OATP1B3 transport protein), can uptake more ICG than HEK293 cells. Accordingly, combination of ICG and photodynamic therapy is more effective on HT1080-1B3 cells than HEK293 cells. These results also prove that ICG can directly affect mycoplasma.

### Example 4

[0057] Sequencing the mycoplasma of the above Examples shows CP035041.1 Mesomycoplasma hyorhinis strain JF5820 chromosome (complete genome, SEQ ID NO. 1) and CP051214.1 Mycoplasma sp. 1654_15 chromosome (complete genome, SEQ ID NO. 2).

[0058] Those skilled in the art will readily observe that numerous modifications and alterations of the method and use may be made while retaining the teachings of the invention. Accordingly, the above disclosure should be construed as limited only by the metes and bounds of the appended claims.

The application's sequence listing, which the Patent Office published only in electronic form, follows.

SEQUENCE LISTING (2 sequences)

SEQ ID NO: 1 - DNA, 852181 bp, Mycoplasma hyorhinis
  source 1..852181: mol_type = genomic DNA
ttgtatagctccgcgattttagaattggaaactacaattagcgcgtctgaattttcttgtagttttttaattccttcagaagctcttgaaagccttttactatcttcaaaatcaaaaggttggatagcaatagctatagttaaagatttcagagttttggctacttttgcaaaaatatgtgaagctccagtccctgttgctccgcccataccggcaagaataaatagtagcttagtatctactaattgttttttaatatcttgctctgctaaaagagctgcccgctcagcttgaatcggatttaattcaaatcctgattctgagcttttgtcatctaataacatagtttgtgaaggattaaaaaatcttaacgtattatttcctgttttggtagttactaacaaataagaaatatcttgaagttgtctatgtttgagaaaatccactaagatgtttgccccacagccacctatagcgatgattttagctttgattacttcagagttttggttgttatttgacatttttccttctcatgttatcttttcaattaatttttatatagaaaattaaagtatttttaatttataagttttgtgagcactcttaatttagcactttttgcacgtttgttattatctatttctttttgatttgctcaagtagttttaactaaatattttgcttgggttgtttcaaaaaataaagtttggttttgcttgagtaattgtttaaaatagtttttaacaattttatcttctaaagaatgaaaagtaataattgctaatttgccatctttttttaagaatttatctattttggataaaaagatatttagtgattcaagttcttgattaacctcaattcgaattgcttgaaaaacatttttagcagggtttttctttctaagtacaaagttaggtaatgaatgtttaattatatctacaagttcagttgtataagtaataggtcttagttttacaatatcttcagcaatattatttgcaaaaggtacttgtccataatttgtgaatatattaactaatttttcttttgagtattcatttactaactcataagctgaaaagctttgagcttgattcattctcatatccaaacgagcttgtttgttgtatgaaaatcctctattggcttgatctaactgaggtgaagatactcctaaatcaagtaatacaccatctactttgttgatttgaagcttttttagttcttgatcaaaatctttaaaatcagatcaaataaattcaatatttgaagaaatttttaagagtttttcttttgtttgttcaattgcttgtttgtctttatcaaagactataagcttgccactagtaagtttttttaaaatttgagtcgaatgaccaccacgtcctaaagtaagatctaaatagataccatcttctttaatattaagctgatcaatcacttgatcaagcaaaacaggtatatgatccattaaagttcaactccagattctaatagttctttttcaagagtttcgatgttatcagcatcttggaattgactttgtagttgattgaatctatcttttggtcaaatttctaattttttccctactccaacaagtatgagctctttgttttgaatagcagagagttctagtagattctttggtaaaagtactcttccttgtttgtctggagaaacctgagttgtattagagaagaaaaatcttgcaaagttccgaatatttttgtttaatgagtttgcttgtgagattttgttcttaattttgtcaaattcttcggcagaacgtatttctagtacttgatctaagctaagactaatataaaatacattacctaattcttggcgataaatgctaggaattgctaatctatttttttcatctaatgttcttaaatttgtcccatacatatctactttttaccactattccccactattatatattaatttttaaaatacaaagattttttttaaattttttttaaaataaaaactcagatagtgagtatattaactaactttctgagtttttttatttacaatattattattattaatcttctaatttcaaatttctatttcaaagctttttgataatatcatctaaattatgatcttgatagataatttgataaagggataaagcaattggtaaatctaggttattggtttttgcaattttgattacattatcaagtgcaactaagccttcaactgttttacttgtctgtaaagctttttgtttatcttggataaattcatatccaaatgaataatttcttgataagtcagatagtgcagttacaattagatcaccaagacctgttagacccattaaagtggtatcttggccacctaagaatgagtttaattttcttgcttcagaaagcccacgtgctaaataagctgctactgtattaataccaaatccttttgaaaaaagcattcctgatccaatagctaaaatatttttatatgctgaaccaatttctgctcctatttcatcttctactaaataagtacgaaaataagaattagtaaatagtggttgtacttgtttggaaatattactatccttattaaccaaacaaacaagtgtatgagcttgttttataatttcttcagcatgtgatggtcctagcaaagaaactattccttttacatatttattatctttagcttcttgacgcattccttgttgtaaagataaaaaagtatttggataaaaaccttttgatgcattaatgatatacacttcattattagttaattgtaatatttgtttaaatacaacatctactacttttgaaggtaaagcaattacaatataagcaacattattaagtatttgttctaaattattacttgtattaaaatgtggaatttgtgtagaacttggaaaatattttaaattttttccttgtgagagttgttctaattcttcattatctattccataaattcaaatatttttaaatcctgaatcataaataactttggctgtggcagtagccatagctcctgaacctataatactaattttttgtaatttcataatttaaaattctaattgaaaaaagcttttaaaaaacaaaaaacccaacaaatattgggttttttgtttgtaatttctttttaagtagttttttgtgatcctgattctggagatttaggagttgcttcttgtgatcctgattctggagatttaggagctgcttcttgtgattctgattctggagatttaggagctgcttcttgtgattctgattctggagatttaggagttgcttcttgtgatcctgattctggagatttaggagctgcttcttgtgatcctgattctggagatttaggagctgcttcttgtgattctgattctggagatttaggagctgcttcttgtgattctgattctggagatttaggagctgcttcttgtgattctgattctggagatttaggagctgcttcttgtgattctgattctggagatttaggagctgcttcttgtgattctgattctggagatttaggagctgcttcttgtgattctgattctggagatttaggagttgcttcttgtgattctgattctggagatttaggagctgcttcttgtgattctgattctggagatttaggagctgcttcttgtgattctgattctggagatttaggagctgcttcttgtgattctgattctggagatttaggagctgcttcttgtgatcctgattctggagatttaggagttgcttcttgtgattctgattctggagatttaggagctgcttcttgtgattctgattctggagatttaggagttgcttcttgtgatcctgattctggagatttaggagctgcttcttgtgatcctgattctggagatttaggagttgcttcttgtgatcctgattctggagatttaggagcagtttctgtttgttcacctgttgttgttccagaaccactggttgttccagactgacctccgcttgtagatgttcctgatcctgaatgtccacctgttgttgttccagattgatctccacttgtagatgaaccagatcctggttgttgtgatttatctgtattagtttgtccacatgaaatagctattagaggtattgaagctagtgccacaagcgaaccaaaactaactaataatttctttgaaaatatcgattttttcacttttcctcaattctttattttcttaaataaattaataaataaaagcaaaaataaaagaggcaaatattatttgtgtgtgttgttatttgtgtaagaatcttgttgatttttacagcaaaattgtcccaagcttttttttttttttttttgaaaatatgaaaaaattttacaaatttaatgttttttaaattaattagagaaaatttttcataaattcttattaaaacaaaattattttaaaaaatgagtattttttatttatttataaaataaatttaatatctgtttttaataaaaaaagccaacttttgttggcttttactaattttatgtttactttaaaatttaaataaataataggaactattatttggttgatccatttccagaatcttgtgaatctgatcctgttccttttgctccagaatcttgtgaatctgatcctgttccttttgctccagaatcttgtgaatctgatcctgttccttttgctccagaatcttgtgaatctgatcctgttccagtcttacctccagttgtagatgaacttgatcctgatcctgattgtccaccagtagtagttccagtctgacctccagttgtagatgaacttgatcctgatcctgattgtccaccagtagtagttccagtctgacctccagttgtagtacctgatcctaatccagttccggattgacctccgcttgtagatgaaccagatcctggttgttgtgatttatctgtattagtttgtccacatgaaatagctattagaggtattgaagctagtgccacaagcgaaccaaaactaactaataatttctttgaaaatatcgattttttcacttttcctcaattctttattttcttaaataaattaataaataaaagcaaaaataaaagaggtgtgcattatttgtgtgtgttgttatttgtgtaagaatctttgaagatttttacagcaaaattttcccaagcttttttttttttttttttttgaaaatatgaaaaaattttacaaatttaatatttttaaaataatttaagaaaatttttcacaaatttaatggaaaataaaaatattttgagttttaaaactttttaattaattgtgggtaaatcaatattattttttataaaaaaaactcaacaaggtgaggtgatacccttttcttgaaaaaatttttgagtgttttaattaattataatttgaaatgaatgtttcccaaaatttaatgggagacattcattttattttatctttaattcgtttgtaattgtaataataaatataatttgcaattgctttgtgaaattgtttaaaagttaaaaattctttttcgcgaccataaaaacattctctttttaatgtcccaaaaaatgattcaataacgctattatctaaacaatttccttttcgagacatggactgagttattcctttttgttttaatttttctgaaaattgtttatgttgatattgtcaaccttgatcactgcgaaaaattaaaccttcaagatttttgtgctttgaaaatgctctttgaagcatttttctaatttgctggttagcgcttgtagacaaatctcaagcaataacttcgccattaaacatatctaaaattggcgataaatatgcttttccaaatggtccgctaaattcagttacatctgtagttcatttttgatttggttgagtagcaacaaaatttctatttaaaatattgtctgcaattttgccaactgttcctttgtaagatttgtattttcttcttggacaaattgctttgagattgaatttttccattaatctgcgaacttttttaagtccaattttatagtctctattattaagttcagcttttattcttctttttccatatcttgctttattttcttcaaaaataagcttcatttggcttataatttcttcatttttcttgtcaaaatcttcttttttgagttcataataaaaagtagatataggaatagaaaactcttttaatacttgagttaattgcaggtttttatcagcttttactctattataaattttttttattttttcttgccttggttgatttgagtcaaagatctctaccaaggcttttcacttttttagaacttcattttccttttttaaaagtttattttcttctctaagaagtttaagttcttcatatacagataatgaagaatttgattgatcttgactatcggaattgtttgatacttttgtagatttattattattattattattattaatcttagatttcattattggtctttctttgtttaattctaaaccactaattcccgattctaaatattttttcgctcaaaaagatatttgacttggattaagattattttcaagtgaaattttaacaattggttcaccagctaaaaatcttttaactatgtttaatctttgatctatagttcactttttatttcgtggttttttcttaagaccttcaactcctaatttgtcataaattttttctcaaaaatttacttgatttaaaaaatttttttgacttgtattagcaaaatcaggctttttaatttcaattccttttttgtatttttttacacattctaatttaaattctaatgaatatttcataaaaaatccccttttctatttttctaggaaaaggggatctgctcaaaggttgagttttttatttttttatagttacacttaaattttaaatttaaataaataataggaactaagatgtgtgttgtgtgttttcagttttttctgaattcattcctgattcagaatttgatccactacctgtatttgtagttgttcctgcttgactacctgtagatgatccagaatttgattcactagttgttttgtttccagtgtttgttcctggagcttcactttgttgtgtgttttcagtttttgttcctggagcttcactttgttgtgtgttttcagttttttctgaattcattcctgattcagaatttgatccactacctgtatttgtagttgttcctgcttgactacctgtagatgatccagaatttgattcactagttgttttgtttccagtgtttgttcctggagcttcactttgttgtgtgttttcagtttttgttcctggagcttcactttgttgtgtgttttcagttttttctgaattcattcctgattcagaatttgatccactacctgtatttgtagttgttcctgcttgactacctgtagatgatccagaatttgattcactagttgttttgtttccagtgtttgttcctggagcttcactttgttgtgtgttttcagtttttgttcctggagcttcactttgttgtgtgttttcagttttttctgaattcattcctgattcagaatttgatccactacctgtatttgtagttgttcctgcttgactacctgtagatgatccagaatttgattcactagttgttttgtttccagtgtttgttcctggagcttcactttgttgtgtgttttcagttttttctgaattcattcctgattcagaatttgatccactacctgtatttgtagttgttcctgcttgactacctgtagatgatccagaatttgattcactagttgttttgtttccagtgtttgttcctggagcttcactttgttgtgtgttttcagttttttctgaattcattcctgattcagaatttgatccactacctgtatttgtagttgttcctgcttgactacctgtagatgatccagaatttgattcactagttgttttgtttccagtgtttgtttctgaattagaaccatttcctgaaccattagttgaacctgatgaatttgttccagcagttccatttgttgatcctgattgatttgttccaccagatgtgttagtagttcctgatcctggttgttgagattgggatgaattattatctgtttgtccacaagaaattgctattagcggtatcgcagccaaagccacaagcgaaccaaaactaactaataatttctttgaaaatatcgattttttcacttttcctcgattcattatttgatttattaaaaaaatagtctaattaataaataaaagaggtgattattatttgtgtgtattgttgtcatttgtaaaaatatttgaagatttttacagcaaaattgtcccaatctttttttttttttttttttggaaatatgaaaaaaatttacaaatttaatgttttttacaataatttgaaaaaaaatttcacaaacttaagtggaaacaaaactatatctaatttccaagaattatttttattttctaataaataaagatgaagatatatgtagatttttataaaaaaagccaacaaaagttggctttttactaattttatagttatttttaaatttaaataaataagaggaactattatttatttttgtttgtgttcttgatcttttgaggtttttgaactttctgttccactacttgtacttgatcctgaagctgaatctgcttgtccacttgattcggtagttgaaccagttccagttgtagaacttgttcctgaagttgaacctgtttgaccacttgattcggtagttgaaccagtttcagttgtagaacttgttcctgaagttgaatctgcttgtccacttgattcggtagttgaaccagttccagttgtagaacttgttcctgaagttgaacctgtttgaccacttgattcggtagttgaaccagtttcagttgtagaacttgttcctgaagttgaatctgcttgtccacttgattcggtagttgaaccagtttcagttgtagaacttgttcctgaagttgaatctgcttgtccacttgattcggtagttgaaccagtttcagttgtagaacttgttcctgaagttgaatctgcttgtccacttgattcggtagttgaaccagtttcagttgtagaacttgttcctgaagttgaatctgcttgtccacttgattcggtagttgaaccagtttcagttgtagaacttgttcctgaagttgaatctgcttgtccacttgattcggtagttgaaccagtttcagttgtagaacttgttcctgaagttgaatctgtttgaccacttgattcggtagttgaaccagtttcagttgtagaacttgttcctgaagttgaatctgcttgtccacttgattcggtagttgaaccagtttcagttgtagaacttgttcctgaagttgaatctgcttgtccacttgattcggtagttgaaccagtttcagttgtagaacttgttcctgaagttgaatctgcttgtccacttgattcggtagttgaaccagtttcagttgtagaacttgttcctgaagttgaatctgcttgtccacttgattcggtagttgaaccagtttcagttgtagaacttgttcctgaagttgaatctgtttgaccacctgtttcagtggtagaaccagatcctggttgttgtgattgggatggtttattagtagtttgaccacatgaaatagctattagaggtattgctgttaaagcaacaggcgaaccaaaacttactaataatttctttgaaaatatcgattttttcacttttcctcgattcattatttaactgattaattaataaaataaaagaggtaaatattatttgtgtgtattgttgtcatttgtaagaatctttgaagatttttacagcaaaattttcccaagcttttttttttttttttttttgaaaatatgaaaaaattttgcaaatttaatctttttagaataatttaagaatttttttcataaatttaattgaaaatgaaaagaacatctaattcttaaataatgatttttaataaaaaaactcaacctttgtgagcagatccccttttcctagaaaaatagaaaagggattttttatgaaatattcattagaatttaaattagaatgtgtaaaaaaatacaaaaaaggaattgaaattaaaaagcctgattttgctaatacaagtcaaaaaaattttttaaatcaagtaaatttttgagaaaaaatttatgacaaattaggagttgaaggtcttaagaaaaaaccacgaaataaaaagtgaactatagatcaaagattaaacatagttaaaagatttttagctggtgaaccaattgttaaaatttcacttgaaaataatcttaatccaagtctaatatctttttgagcgaaaaaatatttagaatcaggaattaatggtttagaattaaacaaaggaagaccaataatgaaatctaagattaataataataataaatctacaaaagtatcaaacaattccgatagtcaagatcaattaaattcttcattatttgtatatgaagaacttaaacttcttagagaagaaattaaacttttaaaaaaagaaaatgaagttctaaaaaagtgaaaagccttggtagagatctttgactcaaatcaaccaaggcaagaaaaaataaaaaatttataatagagtaaaagctgataaaaacttgcaattaactcaagtattaaaagagttttctattcctatatctactttttattatgaactcaaaaaagaagattttgacaagaaaaatgaagaaattataagccaaatgaagtttatttttgaagaaaataaagcaagatatggaaaaagaaaaataaaagctgaacttaataatagtggctataaaattggatttaaaaaagttcgcagattaatggaaaaattcaatctcaaagcaatttgttctaaaagaaaatacaaatcttacaaaggaactgttggcaaaattgcagacaatattttaaatagaaattttgttgctactcaaccaaatcaaaaatgaactacagatgtaactgaatttagcggtccatttggaaaagcatatttatcaccgattttagatatgtttaatggtgaagtcattgcttgagatttgtctacaagcgctaacaaccaacaaattagaaaaatgcttcaaagagcttttttcaaacacaaaaatcttgaaggtttaatttttcacagtgatcaaggttgacaatataaacatagacaattttcagaaaacttaaaacaaaaaggaataattcagtccatgtctcgaaaaggaaattgtttagataatagcatcattgaatcattttttgggacattaaaaagagaatgtttttatggtcgcgaaaaagaatttttaacctttaaacaatttcacaaagcaattgcaaattatatttattattacaattacaaacgaattaaagataaaataaaatgaatgtctcccattaaatttagggaaacattcatttcaaattataattaattaaaacactcaaaaattttttcaagaaaagggtatcacctcatttttttttttttttttgcaaatatgaaaaaattttacaaatttaatattttttataataatttaagaaatatttttataaatttaatggaaaattaaaaaacagcatctcaaacagatactgttttttaatattattattgattttttaatttaaataagaatagttgttattttgagacttggttatttccttgctctggagttggagttgatccaccttggttatttccttgctctggagttggagttgatccaccttggttatttccttgctctggagttggagttgatccaccttggttatttccttgctctggagttggagttgatccaccttggttatttccttgctctggagttggagttgatccaccttggttatttccttgctctggagttggagttgatccaccttggttatttccttgctctggagttggagttgatccaccttggttatttccttgctctggagttggagttgatccaccttggttatttccttgctctggagttggagttgatccaccttggttatttccttgctctggagttggagttgatccaccttggttatttccttgctctggagttggagttgatccaccttggttatttccttgctctggagttggagttgatccaccttggttatttccttgctctggagttggagttgatccaccttggttatttccttgctctggagttggagttgatccaccttggttatttccttgctctggagttggagttgatccaccttggttatttccttgctctggagttggagttgatccaccttggttatttccttgctctggagttggagttgatccaccttggttatttccttgctctggagttggagttgatccaccttggttatttccttgctctggagttggagttgatccaccttggttatttccttgctctggagttggagttgatccaccttggttatttccttgctctggagttggagttgatccaccttggttatttccttgctctggagttggagttgatccaccttggttatttccttgctctggagttggagttgatccaccttggttatttccttgctctggagttggagttgatccaccttggttatttccttgctctggagttggagttgatccaccttggttatttccttgctctggagttggagttgatccaccttggttatttccttgctctggagttggagttgatccaccttggttatttccttgctctggagttggagttaatccaccttggttatttccttgctctggagttggagttgatccaccttggttatttccttgctctggagttggagttgatccaccttggttatttccttgctctggagttggagttgatccaccttggttatttccttgctctggagttggagttgatcctgaaccatttgatgtacctgatccacttcctgaacctgaaccaggttgctgagattgatcagtattagtttgtccacatgaaattgttattaaaggtattgctgctaaagcaacaagcgaaccaaaactaaataataatttttttgaaaatatcgattttttcacttgtcctcgattcattatttatttaaatttaaaataaaagtacaaataaaagaggcataaattattgtgtgtgttgtcattatgttgtaagaatctttgcagatttttacagcaaaattttcccaatcttttttttttttttttttgcaaatatgaaaaaattttataaatttaataatttttaaaataattcaagaaaattttttacaaattaaataaaaaataaaacagtctgttttatatgactgtttttctttatcaatgaatttttacaaatggaataataatatattttatgtaataaaaaaagccaattaattggctttttttacattttatttattttaattttgtccatctgatgttgttggattggatggattagattcttttggatctgatgttgttggattggatggattagattcttttggatctgatgttgttggattggatggattagattcttttggatctgatgttgttggattggatggattagattcttttggatctgatgttgttggattggatggattagattcttttggatctgatgttgttggatttgatggattagattcttttggatctgatgttgttggatttgatggatttgaatgttgtccatctgatgttgttggattggatagattagattcttttggatctgatgttgttggattggatggattagattcttttggatctgatgttgttggattggatggattagattcttttggatctgatgttgttggatttgatggattagattcttttggatctgatgttgttggatttgatggatttgaatgttgtccatctgatgttgttggattggatggattagattcttttggatctgatgttgttggattggatggattagattcttttggatctgatgttgttggatttgatggatttgaatgttgtccatctgatgttgttggattggatggattagattcttttggatctgatgttgttggatttgatggattagattcttttggatctgatgttgttggattggatggattagattcttttggatctgatgttgttggatttgatggatttgaatgttgtccatctggtgtagaaactgagctattagatgaaccgtttcctgatgctgaaccagattgatttgttccaccagatgagttggtagttccacttccagatccattatttgaaccgttttctgtatttgttcctgatccacttcctgttcctgagccaggttgttgtgattgggatagattatcagtagtttgaccacaagaaattgctattagaggaatagccgctaaagtaacaagtgaaccaaaactaactaataatttttttgaaaatatcgattttttcacttttcctcgattcattatttatttaaatttaaaataaaagtacaaataaaagaggcataaattattgtgtgtgttgttattatgttgtaagaatccttgcagatttttacagcaaaattttcccaatcttttttttttttttttttttgcaaatatgaaaaaattttataaatttaataatttttaaaataattcaagaaaattttttacaaatttaattaaaaacaaaataacagtatctatattttagacactgttatttatttataatgaagaattttgtatctattttatataaaaagccaacaaaattgttggctttttattatctagtattcatattacttgttgaagttgaatctgatgatccttgttctttacttgttgaagttgaatctgatgatccttgttctttacttgttggagttgaatctgatgatccttgttctttacttgttgaagttgaatctgatgatccttgttctttacttgttgaagttgaatctgatgatccttgttctttacttgttggagttgaatctgatgatccttgttctttacttgttggagttgaatctgaagatccttgttctttacttgttggagttgaatctgatgatccttgttctttacttgttgaagttgaatctgaagatccttgttctttacttgttggagttgaatctgatgatccttgttctttacttgttggagttgaatctgaagatccttgttctttacttgttgaagttgaatctgaagatccttgttctttacttgttgaagttgaatctgatgatccttgttctttacttgttgaagttgaatctgatgatccttgttctttacttgttgaagttgaatctgatgatccttgttctttacttgttggagttgaatctgatgatccttgttctttacttgttgaagttgaatctgatgatccttgttctttacttgttgaagttgaatctgatgatccttgttctttacttgttggagttgaatctgatgatccttgttctttacttgttggagttgaatctgatgatccttgttctttacttgttgaagttgaatctgatgatccttgttctttacttgttgaagttgaatctgatgatccttgttctttacttgttgaagttgaatctgatgatccttgttctttacttgttgaagttgaatctgatgatccttgttctttacttgttgaagttgaatctgatgatccttgttctttacttgttgaagttgaatctgattgtccacctgttgttgttccagtctgacccccagttgtagtaccagattctgatcctgtttgaccgcctgttgttgagccagttccagtggttgttccagattgacccccagttgtagaaccagatcctggttgttgtgattgatctgtattagtttgaccacatgaaatagctattagaggaatagccgctaaagtaacaagtgaaccaaaactaactaataatttttttgaaaatgtcgattttttcacttttcctcaattcattatttatttaaatttaaaataaaagcaaaaataaaagaggtgattattatttgtgtgaattgttgttatttgtaaaaatctttgcagagttttacagaaaaattgtcccagtcttttttttttttttttttgcaaatatgaaaaaaatttacaaatttaataatttttaaaataattcaagaaatttttttttaaaaatataattaaagataaaaaaattgtatctaaattatttttgaaaatttttgatttctatattcaatccttaatatttatgtaatcttaattataatttctaactaagtattaattcaatatcaattaggtttggttttctttatataatagtagtagtatttttattaaagctaattttttgtcttattttatttatttatttatttgtacaatttcttttttcttttattttttaatcattacttttaaaatcaatttacaaaagtattaatttaattatttatttttataattaataaattatttttaattaatttttaaatattaaaaaatttaatactattaatttttattaagttcctttaacaatagtaaattatcaaaatatattttgatatttttaaagatatatttacaaatacaaaaataaagaaaataaaggatatttttcaaaaaaattattctattaagttaaaattttaaataaataatttactaaaaggaataacatggaaaatattaaaaaatacatatccgattacttttttagagcagaagaggtaattaagaaattcaatccaaacgcaattgtagttttacaattttttcaaaggagagaaaatacaatgctagctggtatgacagaagttttaaaacttttagaaaatcatacagatacttctaaatataaaattcgttatttagaagatggaagcattgttcaaccaagagaggtagttttagaacttgaaggtcattatcaagattttggagtttttgaaggtgtaattgatggtattttagctagatcttcttcaatagctacaaatgctcacgaatgtattcaagcagctaaaggtaaagacataatatatatggcggatcgtgctgatcactatttaaatcaacacatagatggattagcagctgaagttgcaggaataaaaacacatagtacagaagcaggagctagaaaaaatttagaagatatttttggctcaataccgcatgcacttattcaatcttttgaaggagatttagtcaaagcacttgaatactatcatcaactatttcctaaacttgacttaatagcactagttgattttaacaacgatgtaattagtgattctttaaaagtcttaaaacgttttggcaaaaaactttacggagtaagagtagatacttcagcagctgtacaagataaaatgtttaaagaaggcgaaaatcaatacggagttactgtagaacaaattaaaagattaagaaaagctctagatgaaaacgatggtaaaaatgtaaaaattattgtttcttcaggatttaatgctaaaaaaattgctgattttgaagcacaaaatgcgccagtagattcatatggagtaggtgaatatatgcttgaaatcaaagtacattttagtgctgatgcaacaatgattaacaacaaaaaaattgctaaatttggacgtggttatagctttaatcctaaactcaaagaatacaaaaatgataaaaaataaaaatgtaattaaaaattctttaggttttgattcaaatttatttgtttatcaagataaaacaatgtttaattactcagtagataccataatgctgggtaattttataagtttgaacaaaaaaataaaaaactcattagaaattggcacaaacaatgcagctcttgcaatctttgtagccgaacgggattcaaatttattaatagatgctattgatatacagcaaaaagcaattgaattagctaaagaaaatgtcattttgaacaaaaaagaagcacaaattaatttgataactcaagattttaatgatttttgaaaagaacatacaaagttacaaaaaagaaaatatgatttaatttttaccaatccaccatattacaaattagatactaaaaatgtaaaaaaacaaataagtgaagaactaaaaaaagcaatatatgaaataagtattaatttagaacaaataattttgggttcttctaaaataattcaacaaaaaggtatcttatctatggttttaccagttgaaagattggtggatgtaattgaattattaagaaaatataaattcgaacctaaaaaaattcaatttatttttgctagaatcaatacaaaaccttcttttgttttgattgaatctgtttttgctgctacttgaggtactcattatttaccaaatttatatttacatccacaaaacaaaaagctacacatttatcgtaaagaaataaaaaaactctacaaacctataaaaaggaagtaaaatgaagaaaactttttatgtaactactccaatttactacgcttctggagatttacacattggtcatttatacacaacaacacttgcttgagtgattaaaagatacaagcaattagtgggttttgatacaaaaatgttaactggttcagatgaacatggcttaaaaatccaacaaaaagcagagcaaaataaattagatattcaaatttttgtagatcaagttgtaaaaaaatttgaaaatctttggcaaaaattagatatagattacgattttttttcaagaacaacttcagacaaacacaaaaaaatagttgcacaaatttttgaaaaaatgttagaaaagggtttaatttataaaggaaaatatagtggatggtattcaataagtgatgaagaatttttaactccaacacaagctgttttaaaaaatggaaaatactatcatcctgtaagtgataatttattagaatactttgaacaagaaacttacttttttaatatgaaaaagtttgctccttgattacttagttattgaaaagaaaatcctaattttgttattaataaaaaaattcaaaatgaattagaaaaaaactttttagaaaaaggtttagaagatctttcagtaacaagaacagatcttgaatgaggaattaaagtaatatcagatcaaaaacacacaatttatgtttgattagatgctttatttaattatcttactgctttgaactttgatttagaaaatgatcaagattatcaaaaatattgaaaaaatggtgatcagattcttcatattgtaggaaaagaaataactagatttcactgtatttactgacctatatttttaaaatctttagacataaaattaccaacttcaattttatctcacggttgaattattacaaatgaaggtaaaatgtctaaatctaaaggaaatgttgttgatccaattaaattactagaacaatatgataaagaagttattaaactcttttttgctagtcaaattcctgtaggttctgatggaatattcgatcaagaaaatttaactttattttataattccacacttgctaataattttggtaatttaattactagaacaataacaatgatatttaaaaactttgatagacctgttagatacaaaaaagaagaacttttagaagaagataaacaaatttttgaagcaataattgaaaccaaaaacaattatattaaacactttgataactatgaattagacaaggcatttaaagaagtgttttcattatcaaagaaactaaatggttatattgatataacaaagccttgatctgaaacaaataaagatagattagaagttattttaaatactttaattaatggaatttatgcagttaacactttattatctgtatgtttaaaaaatacttcgcaaaaagttttaaaaattttaaaactagaaaaaaatgatataaatcaagttgagaatttttctaaatttgataatctatttttagataaagctaaagttattttcgagagaatgaagtagaataatattttattaaaaagcaagaataatttatatataaaataataaaaaaataatttttgaatttaaaaaggaaattatggacacggcattaaacttaaaagattttgaggaaaaaattgaaaagcaaataaaaataatagatgatgttgttcaatatgcaataaatatatacatcagagagagagagagagagagaataatttaagaaaagaaagacaatttatttcaacattaattttgaaggttttaagagatttggtagaacacacaataattttttttagtattaatggaaatgaaaagtttaaagacttgtttaacaaatgtaaaaaggaacaacagacaatgtgatgttttgttaaagatttggatgaactgaaaacaaataaaaataaacaaatatttgaattccacgataaactccaaagtactgtttcccattacactcctgataagcgtgattctgaaagactattatttgattataaaaaatatttagacattattattaatatgtatcaagaatgtaataaggaatacttaattggctttaaagatttcccatgatatctagaagataacgaattaagttatttaaatcaagtttctaaattaataaaagaacacagagaaaattttaaacctaagaaagataaacatatttatagaatacgaaaaattaaacaatataaaattgatggagaaattttatacgaagttttttttattaattccagcaaaaataaaccattaaaatacaatacttttgttgcctatactgacttaaaaatagattattattattctttaaatttctgttttatagatagatttattacagtggaacaaattaaaggaaaaattcctattaaaattatcaaagaatataaaatagctattaaaaaaagtgaaataaatttatttttatctgttttcgagaataatctttcgttatcaacagaggaagtaaaactcataaataaatttctgaataataacatagaacataaaacaacttttttatctattgtaaataaagtaaatgatgaatttaattcatttcaacatttcttaactaataataaagtaaataataaatttctagaagtcctttcgcgttgtgagaaaataataaagactaataagccaggtaataatatcttgaaatattttttattcactatgaatgaatacgttatgaaacagcaaaaagataataatcataatccatattttaatttatatctcggaaataaagttaaatcttttgatgaattaccgttcagatttaagccaaaaggaacttctttagaaccacaaattttaaaagaaattataaatcaacaggaacataagcatactattctggctgaaaaaatacataatgaattaaaaaatcaaatcggcttttgtatttatattgaagataaccctaatataaaggaaaaaatttcagaaattaaggatttaataaataaatataacaaaacaaacacaataagatattgaaaaaatcaaggaaaagattattctctaattttagaagaaaatcaagatggaaagtatcgagtttacgaacaattcaattttgattgttataaaaatataaaacaattaatagaaaaatattcaaaaatagaaaaggaagataaaaaccgaaatgaaatacttgacaaggttttcgaaaagaaagtaaaatctaaattagtaatgctcactggaccagcgggtagtggaaaaacacattatataaaaaaagtttacgatttatttaaagataaaaacaaaaactttttatttcttactactacacattcaatgctaaattcattaaaaaaacgactaggacttaatgataaagataaagataattttcaagttgtaaagcaatttctttccaattggcaaaatccatccttttctaatcttgatttcgttattatcgatgagtgctctactataaataatgaagaaattcttaaaattttaaaaaaactagaagataagaacattaaattttggttaatggtaggggatccgaaccaacttgaatcgataggatttggaaactgatttaagttactgtcaaaacatagagaatataactttgaactcaaaaattcacgtaggactcaaaatgaaaaattagaaagattatgaaaaaatttaattgatctgaaagataaaagcaagcaaacagcagaaaaggattttgacaattttttaaaaccttttatcaaagagctaaatgaggagatctttactaaaacagagaatgaaaatgatgaagacgagaataataaaattattttatgcttaaactataatggtatttatggtattaatcacattaatcaaattatgcaatctaataactctaataaaccatacaatatcggaatgtttacttttaaagtgggcgatcccattctgtttactgatattggcaaagatcaaaatgggcgaaattattacaataatttaaaaggtaaaattgaagagattagaatattagaagaggaaaacggaaattcgataatttttaaaataaaatgtccctctatactttcagagtttatagaaataaaatcagttttagaaaattcagattctgataatcaggaagtcaacttaccttttactctttcttatgctatttctattaataaggcacaaggtttagaatttaattcagtatcattagtattttcaagtatcacagatgatttaataacatttgaaattttttacactgctgttacaagagcaaaaaaacacttaaaaatttattgatctcctgaagttgaaagaaaaattaaggattccattttagataatttaaatataagtagaaataatcttaaagatactaaaaaatttttaaaagaaaaaatgcttaattaatatactctgtgtttataaatatatttacataattttttattataatttcatttatcaaataagttttagtgaggtaaaaaatatgtcaaaaaagaaaaatgcacaaatagaaacaaataaaacacttacaaaacaagaactcggaaacaaaatttgagaagcagctaatgaaatgagaggttcattagaaattactgagtataaaaatttcttacttgagctcattttttataaaactatttcacaaagatttgaagaatgatttttaaaatataacaaaagtatcgaaaacattcaatgactaaacgatgattattatgaagatgaaaattcaattaaaaatccttattctaaaaatgaatatgaagacataaaagaatctgcaaataaaaatttaggatattttatccagcatcagtatttatattcttcttgaatgaaggataatgcaagaaatttttcagcaagtttactaaatcgctcaattaactcttttgattcaaacttaagaggaaaaagtgaaaatttatttgaaaatatttttaaaacattatctgatgaattatacaaattaagtacaaacgaagcagaacaaactaaaaagttaaaaaagctaattgaaattatcaaagatattcctgttaaaaaaggacaatatgatattttaggttttgtttatgaatatttaataggtaaatttgcatcgtctgcaggaaaaaaaggaggtgaattttatactcctcacgaaatttctttattaatggcagaaatagtagcttttcacttaaaacacaaagacaatattaaaatttacgatccaacttcaggttctggttcattacttttaaatataggtgaagtttttcaaaaatttaataaaaagaaacactcagtcacctactatgcacaagaaattaatgaatctacatacaaattgacaaaaatgaatttaattttgcacggagttaatgtttctgaaattcatgcaagaaatgctgacactttaaaacaagattgaccaattgacaaaataaattcaacagaacctttaagagtagattctgtcgtttctaatcctccttattcattaaaatgagatacagaaaatgctgaatctgataaaagatttagaagctatgcagtagcgcctaaagctaaagctgactttgcttttttactacatgatttataccatattagtccagacggaattgttgctatagttttacctcatggagttttatttagaggtggaagtgaaaaaataataagagaaagattaatcgaaaacgcagaaattgattctattatcggactaccatcagatattttttatggtacttcaatttcaacaataattgttattttaaaaagaaaaactaatgacgaaaaaaatcaaatattatttgttgatgcttcaaaattgtttgtaaaagaaggaaataaaaacaaattagaaatttcgcatatcaaaaaaatagctgatactgtaaataataaaattgaattaaaagacttttcaagattagtagatgtaagtgaaataagagaaaatgactacaacttaaatatttctagatacttagataatttcaaaaaagaagaaaaatttgatttatattctactatctatggaaatgtatcagagacagaattagaagaatttaatgaattttttacaaagtttccagatattaaaaatcaattattagaacctacagaaaaacaaggttattatctatttaaagatccagaaaatattcaagaaacaatatttaattcttcttcagttcaaagttatttaacttcctatgatacattagggaaaagaatatataatctatttaaaacaaattttactaattgagatttattaaaaaaactaaataaaattgaattagaaaaattaattattaattttgtttttaatcaattagaagaaattagctttttagataaatatgatatttttcaaattttaatgaattcatctcttgttataaataattatttagaatattttgaatttaataaattttcagacaaaacagatgaagaaattttggattttattaaatcaacagcacagataatagaaaaagaaagaatagtttctaaaaaaaccaaattaaaagaagcagtaattgttaaagaactagaatcttgagatcatgaaattattcatcctgatatgattagttcaatatttttagctgataaattaaaacaaagacaagaatatgaagaacaaattaatcaaattgtagatgaaattgaatcaattgttgagtccataagtgatgaagataaaacagatatgtactttgattttaaagaaaaagatgatgtttgaaagattagtattcaaaaaataaaaaaagaagctaaaaaactaaaaagcgaacaaattgaagataattctctcgagtcatgaatcttacaaatagatgaattagaaaataatagaaaaaatatcaataatttaataaaagacttaaatcaagaattaattttgcaaacttataatacttttaaaacattaacaaatgaacaagttatagaaattttaatttctaattgaaccaatcctataataaatgatctaaaatctaaatctaaaaaaataatcttagattttgtttttagatttgaaaatttacacaaaaaatatgaagatgttttagaaaatataaacagtgaaataaaagaaaatgaagcaaatttagctactttattaactgaactcgatgcaaatcaatcagattctatagctataaataaacttataaaaattttgaaataaaatttataaaagagaaaatatgttatataaaccagaagaaaatgaagctaaatttgaagaaaaattaatttctttattaaaacattatggctgagaaaatagagaccttactttaaaacaaacaactaatcagtttaataattctgaattaaatgatgttttaaaaaaatattctgataatgttttaaagcgaaaagatgaacaaagtttaattgaaaattgaaaagaaataatttattttagaaatagaggagaattaaaatcaattccattatctgattcagaaatggaacaaatattagataaagttaacaaaagaaatacagttggtttaaaaaatcaatttatcataaacggtgaagtaagtattacaagagatgctggaacaccagaaactaatcctgattatggtaaaacaaaatatttgaatatattttcaaaaactgatgtaaatcaaggtaaaaccatttatcaaattgcacaacaagttgtagacaaaagagcaaataagcgttttgatattgttcttttgattaacggaattcctgtaatacaaatagagttaaaaggtaaaaataattacgccatagatgcattaggtcagataaggtcatatcataaagccggtgtgtataaacaagggattttttcacttattcaaatgtttgtagcaatggatgaaaatgaaatgttttatacatctaataaaaataatgcagatgatattgtaaataaagactttatttttaagtgaactgacgaaaaaaacgaaaaaataacttattgaaaagacattgtacaaagttttttaaatattccaacatctcacaatttgattggaatatactcagcttcagatgataaggatataaaaattttaagaccatatcaatattgagccattgaagctattactagagaatttgaaaagaataataatactatttgaaataataaaacggactttattaaaaaatgtggattaatttgacatgcaactggttcaggaaaaactttaactagttttaagactgctcaagttttaattgataaaaattatgcagataaagtagtttttttagctgatagaattgctttaactgatcagacatttcaaaattatagcgactttgcaaaaaattggagcgaagaagtaactaattctaaatacacttcttctttaaaggattttcttttaaatagtgataaaaaattacacattagttctcatcaaaaaataaacaatattgctaaagaactttctccgagtgaagtagaaaaaattaattcaaaaagaattgtttttatactagatgaatcacatagaagtgtttttggtgaaactgctgcaaatattaaaaaaacattttacaattcagtatgaatgggatttactggaactccaattttcgaaattaataaaaaaggtgagctacattcacaaattatctttgggaaaattcttcacacttatactatgaaaaatgcgattattgataataacgttctgggttatagttttaagtatgtctttttcaatgattataatttttggaaatatgcatatgagcaagatattttaagtgaattaaattatgattttgtaaaagatttttgaaatccaaatgaagctaatgagcataaaaaaaatacaaaaatagaaaaagtaaaacagatattagagtcagataaagaattttccgaagattactttagcattttgcacttcgaaaataaaaataacgatgatattgataaaaatgaaaagttatttgaaaagtttttagagccaaattatctggataaagatgatctatgactttgaaaacatttagtagtaaaaaatattttaaaaacttgagatagttttatggctaaaaaaaatatgtttagcgctatcttagcaacaaatagaattgaagatgcaattgcatattttaaaatttttcagtcatatttaaataaagaaggtggttgtttctataagaaaattaaagtaagcgcattatttgatcctaacgaatcatatactggtgatactgaagaaatagaatttaaaagaaatggagttgaggatatattaaaaaactataatgctctttttgatactaattgaacaatagatacttttagtaattacaaaaaagatcttactataagattagctaaaaagggtccttatcaagtttcttctaacgataatggcacaaattttaataatgatggtaaagaccatttagatttagtaattgtggtgaatcaattacttactggttttgattctaaattcataaatacaattttctttgataaaaacttagaagaagagcacttaattcaagcgatttcaagaactaatagagtatttttaaacaatataaaacctcatggtaatgttgtgttctttaataatccatttaaaatgtacaaaaacttaattcaagctcttaatatttacggaaacattaaatatgcagatgtttccattgtagattttgataaagataaaatattttgagtggtagaccaaataaacgaaaactttaatgcaatcaaaaaattgttttatttatgagatattccttgttttgaaagtattccaagcgatgaagaacaagataataaaattcttattaaaagtcaattagaacagtttttattatgctgaataaaaatttactatttcacattacaactaagaaatttagtagatactaaagaagaacaagattttgtaaatgaaaatgtgcagattacagaaaaagaaagaaaggcacttgaagttttagttagagaagcaaaaagaagatttaaatcaataaaagctgataaatttgagtctccaattatgggagaagaaagattaattaatgattatatttcttcttttggtaaagatattatcaataaggataatattcatcaatttacttattcaacagaaaaaattaaaagattaataaagcaagataatacatatgaactagaagaagaaattaaaaaaataatttttgaaattaaagatgatgaccaaagagaatgagcagagcacaacatagataaagtaactgattttcttacctcacaacccaatgaaatttcattagaaaattttttagaacaagaagttattaaacaaaatgaatataattttaaaaattgatgtgaaattattggtttttctcaatatttttgaatcagagaattacttaataaacccaaagatgaaatttttaatttaggtaaaaacgaagaaatactaagcatatgagattgtggcaaatataaacaatatttaaaagaattaaataaagaaaatgttccaacaggttgcgtagccttatacaaaaattttcaaggagaacttgaagattgatcagataaattaagtaggaaaaaagattaaataaaaaccagttaaaactggtttttatttaatcaatttctactttaactttaccttcttttcttcatttttcaagcaaattcattcattgttcttcgttttcacatagtaaatattctaaaatttcagcatcttttatagaattaaattttggagaaacaccagaagatgtatgttctaaatatcaagttttaatttgcgctatatcatcttcaacttcttctttgttaacattaaaagaatatgtttgtatttttcttttttcaataggaaagtttttaggatctatataatcttgttcttttaaaaatgttgctacaatagcaaatctatctaccttttttaagtaagcgtacaactgagcttgttttaagtattttggaggtaaattttcaccgtttttacctcatttttcaaagtttttttcgcccgttgtcttaatttcgattattagttgtttttcttcaataaatccatcaggaataccaccaattatcggatcttctttaaaataatcatagttatatttttgtggcggaaacacttcgacttttacttttaattttttctcaatcgcagctactactaaaggctcgatagctaccccggcatcaatatatttggtatctaaaataggcatatctaattttgctagtctaataaaagctttaaaggctgaagaataatcatcaacttctaaaacctctccgatagaagaaccacctatttttttaaatcctgtattaaaagcaaattctttgtttaatagcttttgatgaaattctttttcaagaatcacttcttttttttctaaatccacaaagtattcttttttattataaaacttccttgtcatatctttattatattaaaattccttttaaaatctaaaattgaataaaataaaaactttttctttagtttgtttactttttttatgctaatcaaggttcaaaaactataaatgaacacaccagtcctgttaagaaaataaagaaaataggtacttttttacgatacattacaaatgaagctagtgtataaactggaacaaaaactagtaagacataatatcttcaatttgtaaaaaaagtgttttttaatgaagtaatatcgctatatccaacatattgtcccattgatttattaaaataaatttgaataaaataaatgctaatgaataattgaattgctaagctaatcataatagccgcgatcgcaggtttaaataaggaaaataatttcttaaacctaggattatttttatgcttttttaaaacttttaaacctaaaataactaacaaaattgctggtaaactaaaaacaaagtagaaaaatatagataaaaatattcctcaccactcattattagctacaactaaaccagtaactgctgcaaattttaatgaaacaacacctggtgtagaatttgtgatagaaaaaatctcttgtattctgttttcatctattcgagttccaaactgatttgctaaaaatagtcaaaatcagttgaaaacaggcataaaaacttgccctcctccaaaaactattaagcaaataactatcagtaaaaaaatactagttattattactaaaatcattttttttctttcttatttttttataaacaaactcaaatagtatgtaaattataaaaataattactaatgaaataacaggcaaattaaatggtgcaggaacaaaaatacaaaataaaaaagtaaaggcaaaaattaaaattaccaaagctagtgacaactcttttttacttgtttttatgtagttaactccaaatgctattagtattccaataatagcaggcattattcctatatttataactagtaaatattttggtggtaagtaagttgaagcataaattaatatcaaagcaaatagcatatgaggaaataaagcaagagtagtagctaaaatgcctttaaatttacctaacattttaatacttacaaacgaaaacatttgtataacactaggtcctggtaataaattcgtcataataacaacttcatcaaattctgcagaagtgagtcagttgtatttttcaacataatatcttttagcaattggcataattgcattaccgccaccaaaactaataaaagatatttttaaaatgaatcaaaatactttccaaaataaattaactttcatattttctttctttgtaaaattataattgataaagaaaaactttttagtttttaaaaatcaagtataatactatttggccttagaggtgtagttcaatggtagaacaacgggcttcaaccccgtgtgttgcgggttcgactcctgtcacctctgccatttttttatttccttttttcataattttgagttgaaaattcatagagtaaaatagcagtggcatttgcgatatttaaagattcaaatgcgattggaatataaatttgtttttgaattattttttctaatgcagctgaaattccactggattcattaccaaaaataatggcatatttttgttcattttcaattacaaaatcctttatttttgcagctttttttgataaaaatgttcctatggaaacaaaattattttgatgcaatttatctaaaatttgtgataaattttcaacttttaaaattggagttttaaaaattgcaccttttgaagcactaataacctttgagttataaaaatccacgcctgaataaattaaagcaaaatcaaatgctgaacaattacgaatgatagttcccaaattccctggatcttggatattttctaaaatgacaattcgtttatgttgcaaaaagttttcaagttttacaacatctaatttgttacacaaagcaactacttctgaagctgattcatatgaagtaatttttttcataattgaatgagaaatgagaattatttgttcatttttaaaggattttatttgtaaattagcatttgttgtgtaaatttttataacttttttatattctaatgctagttctaaatctttaatattttcaactaaaaaagcgttgtaaatttgttgatatttttttaattttaacttaattaaaaatttaatttctggattttgtaatgaactaatttgcttcatttaaaaagtattttcctttttgaacttcatacaatgataatgattcaaaatttaattgtcttaatacttcgtaaatgacaataacaactgaattagctaaattaagtgatctagatttttcttgcatcggaattctaagacatgtgtttaaatttttggataaaatggatttcggtatccctgttgattcggttccaaacattaaaaaaatatcttcattattatctctaatctgtttaaaatcaacatcagaataagtttgtgttgcatatcttgtgatgtaaaaaatttttttatcaccgtattttttaacaaattcatcataattgctatgaatttcgtgttcaatatctgataataactttccagctgctggccgttttaaatatcttggttctaattcaaaagcaatgggtttaataatatgtaattttgcattagtagcaaaacagcttctgataatatttcctgtatttggactaatttcaggttggtataaaactatatgtatcattttagttttctatctccaaaacaacaaaatattgtccaactaattcaccttttaaagtatataaactataatgaatattaacttcattttctgtttttgaaagcaattgaagtgatgattctaaaaacatttgaccataagttgtattatattcaatagtgtgtttttgttctttatcaagaacaattgtagaaaattcagtaatgagtagtgctttattattgtagatttctattcttaatacacctttgttttctggatttgtaaatgtataactagtaaatggttcttgtgtatcgatgctaatttcttcttctttttcaagtttagattcaaaagctattttttgatcttcactttgtggacttttaattaaagaagaaaattttactctcattttacaagcctttttgaaattagttctttacctagtaatcaaataactttagctaattcaggtccagaagaacgaagagttgtagctattctaattggtaaaagaagctttttaccacttaaattgctagcttgttttgttgattcaattgcttgttctaacattgcaacagtaaaattatcccaatcgataaatgaagtaaatgttttgagtaaactatcatcaatttgttcgtaaagttgttggtctttttcattgtgacaagtttgcaatatttgagcaaatgagttaatttctttttctaaatctttataagttgtacaacttgctttgtaagtatcaatagcaaaatccaatcaatctgctgaaatattttcaagtttaatatctatattttctttaatttgttcattagttagttctttaaaatattgttttgagaatcactctagtttttttgtatcaaatttagaaggtgattttgagagtctttcagctaaaaaagctgaaataagttcttcttttttcattaattctttagcatcttgtgaagttcaacccaataaagctaaaaaattaaaaatagcttgtggtaaataaccttcatttttgtaatcttcaatgaattgaaataaacttttatctctttttgatagctttttaccattttgatctgtaattattgtaagatgaccaaaatgtggatgatttcaattaaaagcatcataaacagctaattgctttggagtattagaaatatgttcttcacctcttaatacatgagtaatttccatatcatgatcgtctacaaccactgcaaaattatacgttggatacccatcagattttataataactcaatcaccaatgtcattagaattgactttaataggacctcttactatatcatttcaagcatattctttatttttttctaaagctaaacgaacagaaaattgcttgtttttaaagcgctttagcttttcttgttgtgaaatttttaaccagtttctatcgtatctgaaactaaaaattccttttttttcttgttcttgtttttgtagttgaatttcttctggtgaatcaaatgctaaataagcttttttttgtgctattagttgatgtgctaaatctcaatatctttttaatttttgtgattgacgataaaaaccatattttgaattttctttagttgggtattcatctggaataatgcccaaccacaataaattatctaattgagatttttctccacctactacatttcttgcaacatctgtatcttcaattcttaatacgaaatcacctaaaaaatgtttggcaaataaataattaaataacgcagttcttgctccacctatgtgtaaatatccagttggactaggtgcgtatcttgtacgaatttttctattagttaaatctattacttttgacattttactcactttcataaacagctattctgactttattatttatatcataaattagcttaaattctggataatatttattaaaaaactctaaatttgtttgatcaatttcaaataatataacacctttgggttttaaaaaacttttgtattgttttaatattttttgataaaaataattacctttttgctttgcaaataaagcatttcatggttcataatctaaaacagaagaatctaatttagatttttcaaaatccaaatatggtgggttacaaataattacatcgaatttgtatttttttaaattatcaaataagtcagattgaataattttaacttttaatttgtttaatttggcattaattttactttgtaaaattgcttgtgaatcaatgtcggataaaactacttgttttgctttggtgtttttagcaatagcaagaccaataaaaccagatccacatccaagatctaaaactgtggattgtccatttatgtacttatatgcttgtaaaattaattcctcagtttcataacgaggaattaaaacttttttattgattttaagttgcaaattttgcatacaaacaaatccaatgattttttgaattggaatgttagtttttagtaattttgcttctttttggttgataattagttctaaattatttctttgtttttcttttaataaagctaattttctattagtaaaataactattgtttttgttcatagctagttgctattctttctgctttatcttcagctaataaagcatcaataattgaatctaaatttcctacaattacatttttaagtgaagttgaaaagctgattcgatgatcagttacacgatcttgaggataattataagttctaattttttctgaacgagctcctgatcctgctagttttctaaattgaccttcaattgcttgttttttttcgacttctagattataaattttagattttaaaatctttaaagctagttctttatttgcgatttgtgaacgaccatcttgtgaagtagaaacaagaccagtaggaatatgagtaattcttacagccgaatcagttgtattaactgattggccacctgctcctgaagaacgataagtatcaattcttagatcttgagctttgatatccacttgaatatcatcatctacttcgggcattattgtaactgttgttgtagaagtatgcactcttccctgagtttcggtttcaggaattctttgtacccggtgaacgccggattcgaattttagttttgaataaactttatcaccgcttactaaaaaaacaatttgagtaaatccaccagcagaagctagtgaggaatttaaaactttaacagatcattttttagattctgctcattttaaatacattttataaagatcaccgacaaagatatttgcttcatcaccacctgcagctccacgaatttcgacaataacatttttatcgtcattttcgtctttaggaagtagtaatacaactaattctttttcaatttcttcgattttttttgtagctaaagtgatttcttctttggctaaattatgaatttctacatctttttcttggagtaattttttagaatcttcaattatggaaacttgttttaaatagtttttaaatgcaagaacaatatcttcaatcgaagctaattctttgttgatttttgtatattctttaatattagaaactatttctggatctaataattgattagataaatgctcgtatttttctttgattgaatttaacgagtttaacatacttttttccataattgatcctttattttgtaattttattttttgaaagttaagtaattttacttcatttttgaacaaaattagtcttttatgctttattttctggattatcttttaattttaaaaattcttcgaaacttacacctttttgttcgataatattagcttgtttattttctagtttaataattctatcagctagtggaatcattgatatatcatgtgagaccataacgattgtggttttatatttttcattaatatattttaaaacttttaaaacaattgcagtatttttttcatctaaagcacctgttggttcatcagcaaaaatgatttctccgtttttagctaatgctcttaaaatggaaattctttgttgttgcccacctgacatttgtgatggatatttaaattttatttcatctacttcaaattctttaaataattgggcaatgtctatttttttgtctttgtctttttgtaaatgcgaaccaacttggacattatcgtatccgtttatactttgaagtaaattatagttttggaaaataaaggaaatattatctcttctaaattcagttaattgggcatttgttaaataagataaattttcatttgcaacaacaatatcacctccagatgctcgatctagtcctgacattaaatttagtattgtggatttacctgaacctgattttccatacaaaattgcaaattcacctctcttgatactaaaacttatatctttaaaaacttcagcaactacagaaccaaataaataatattttgaaactttaaaaaattcaatgatattatcagctgtatttttactaatttttttgctggatttaggaagagggtgattatttgctcatcgaactaattttaattgttttttagaaagttgaaaatcagaatttagattcttagcaataatttcatttactttttcagatttgttacttcttgtgaagtttttaaaaaaattagttattaatgatgtaaatttattctttttcatattatcctttggtactaaagtgcttgttttataagttatttctttgttttcgtttttaccttggttttattttttgctttgatgtttgtagctacaagataaataagtagtttattcttcttttagaatataaactgattttttacgattgagtaatcatcaagcaaaagtgagtgtgattgcaaaaacaactaagataattgctaaggtaataaagagattcaacgctgaaaaactaattgctaatacaatggagctagtagaaataatgtagttgttaaataaactaataaaggcataaacaagtgggattgaaactaaaaatccgatcaagacaattggtatatatactgtgaaaaacagttttactttttgcaatgttgaataacctaaaacagataaaatagctatgtttttttcgttttcagcaataatcgttgaagccataactactaaaataattaccgatacgattaagaaaattactacaatcattgaagttgctgagctaaataatgaagcaaagttattaatgaagttagtttcaatatcttttgctgaaattgcttgggtttcaatttgatataagttatcactgaataaactattaaagttttttaatccatttcttattactatattgtatttatcaaaatattcttcatcttctaattgtttaaagtttaaactaattttttcttttagagcatctttagaatcttgattttggtaaattaaacgataaagatcgtcttttgtaaatccttgtttttgtaaaagaccttgtttagtagttgtatcacttgcattatctgaataagcaaaaatttctctaaagaatctagctgctatttcgttcgaaattccatttacatcaattgaatctgttcctgctcagtaaccagaaggagaataaagaccaatagaagaagtaatttgctctggttgtttgtttgttgacattaatccattaaaggctttaaaaccaaagtttttaagtattggattaaactcatccatttgtgttaatttattaacaacatcacgagttgaaattaattctgagttaataaaagtattagaaatagcaacaattttgaatttagctgtttttgttggtttgttattgaatttatcttgataacgagtaattgtgttaaaaattggtaattcaatttcagaacctacttttagatggtgtttttgtaaaaatactcagtttgcagctaaaggataaacattggaatttgttgattgtttttcgtagttttcaagtatatttaaaacattttcgcctttgttgttttcgattttgacaaatttagaatctttatcataaccgtaaatttttaaccctgattcagatttaaattcagtatctatgtaagagaataattcatctttttgtgggttaaataaaattccaccaaatgaaatactaaaatcacgatcaatttttttatatccttcaattaaaaacttacgatattcatcacgtgatttactttttagtgtaacttcttctgagtcatatgcttgttcttgtggattgtaaacaaaatatcaaaaacgcgatgctttaggattgtctttgtcttcaatgtatttaaagtaaggttcgtaatttggagcttttcctttgtaagtaaattctgcaccatttcggatttcagtttttaaatcctgggttttttcaagcgaagtaaaggctttacctgaaatagtgagaatattgttttttaaagattctggaaggttattaacaacgatatcaaaaatggttccattattttgtgaactacttttgatatttaatgaagaacgagttagaacttgtggagcgtatggaatagtttctccatttgctttgtgtgaacctttgatcagcgcatgtcctggttggaagtatttggtatcttctagatcaacttctccttcaaatccttcaggcacatatagttgattatctaaatgagctaattcataaggaacaattggcccaccttcttttgatggagtaaataaattgattctaaagttataaaatctattttttcaagtgttttgaactgaattttggaaaatatttcttgatgacaaagcaaaaatcaacacaaaagaaactaaaacaactgaaatcattagtgaaaagagttttcaaaatgagttaataattaatgaaaaagaaaatttagttgtaatatttttgtttctgagttttctagataagaaaattgcaaatttggaagtattaagttctgtaataccggataataattgatttggtttacgccttagtattcaaacaactgaaatataaattgtaattgttaataaaacaaaaggaataaataacgaaataacaaacgaaataggttcaaagaaagtaaaatcagtattaaattctcaaaattgctgtaaaagattaagcattggttttcgtaacgcaataccaagaacataaccaaacaagccaccaataatcgaagttgctatagaaattgaagtaaatgaagtagcaatttcgaacaatgaataaccctgtgctcttaaaattcctaaaactttgtggttattatttacatattttttaacaatgaaaacaacagcaaataaaactaaaacagataagaaaaaggttaaatataagttaatattagataaattattaacaaaacctaaagccgttgacaatcttagagatctttctggatttaagaagtcaaaatcgttaatagaataagtttttttaatatcagtttgtgaaaagttttgtgataaaaatttatttgtatctgctttgaattgctgtatattagtttgtggatctagtttgactaataatgactttttaactacactagagcgattggattctcttactttatcaaaaccgtatttattaacaaaaacaagcgcttgattttgtgcatcaatttgaagattattttcatctaataaaggataaagataatcaccagttgaatcagttcctacaataataaattgcaatccattgatatcaagaatgtatttttgatccaatgtttttattaattcttgtatttttgctgttgaagtaggaagcgctttgtcataaattgctttgtgatttgcatcaagatatgattgatttactttagcaacaaaagaacgattatcataagctacaactaagttaacaaaatctctaattacaaaaagattgctaactaatctatcgaaaaagtttttaaaattaagttcaaaaaattcaactggtttttgatccgcgctgattaaaactttgttggacactcaattaatatatgaataatctaaagaaacaccttttacttgtgaagaattaaaatccaccaatggtttttgattatcacctacaaatgtatttgtaggtgaaaacatttgacttactttagaaatgtagtcatttggatatttatctttaaaaaagtagtattttggtaaagagtttcttagtactcaagctaggtttgaattagcttttgttccttctgaattaatttgttcataaacttgttttgtattagttgcaaatcataaagaagcttgcggaaatctagatctaaaatatggattaataactaaaagacctaaattaagacctcttagatattgactaagattgcttgtagttgcttggtgataaagtttgtttaaaacttgtttgtcaaagtaatttaaatcattgtttttaagcaatatatcatttacaacataatcaacatttttataatgtgcttttaataataatgattcagattttgaataaccaataagtgcaaggttttccacaaaggcaaatttattattaataattcattttgctagtgagttgtggaatttgtcttcttttttgaacagatttgaagcaaaaagctttctaagaccttcagaagcaaatttatctttatcttctttgaaaagttcaaaactaacattaaatggttgtaaaattccttttcagagttgactcatttgccctattattaaacctcttgttgatacattttcaacattagcgtctaaatcaaatgaagcaattgaagaatctttataaagaaagctgtttttatccaaagcaagatcatataggattttaaaagcttgttttagttcttcattacttaattgtggattttctgtgatcattctaattcaaaagccaaaattacttaatccttctttgactaaagaatctggatctttttcaaatggagttaaaatcgaacttgcaagtgcttgtttgtaaatagttgaaacaaaaaggtattttgaactttgttcggcattaaatttgctattagtgtatttttcataactatcaactgatgaagctgtatcgtaaacaacatctcctattgagttaagatattttaaataaactccaacatcttcaggattaatttttgattttaaatttggatctgttaaacttttttgatacaagtttcaagaaatcaatggatgttttgaattattaatattaactaatttgttatcatcagtttttgtatatgctgaaatttctagtaatgaataaattttagcaatgctttttagtcttaaataaacattgattaaatttgtattatcaagttttttaatatcaaaataatttactaaaaaatctttaagtggtgttgttaaagacaatgaatctatatcaaatgctttattagataaagtaaaattgttagcatctaattgaacattattgttaagattttgttttgaaagtgcattgttcaacttattaatatctaaaacttgttcaattttattaattaagactttagaagtagttttaacatacgcaggacggttcagtgaaacaatgtcagaaagtgattgtatttcatctaaggttaattttttatcatcatttgctggtgaattaatcccataagtaattgtagtagcacctgataaattaaatgcttttattaaaatctcaattagttggttttgtgattgtttatctttagcaagtgtgagcacaaaagaagcaattacatcagaaagttttaatgaatctgatttaaaatgcttagtttccatttttttagactcagctgagtaaagatctatatcagttttaaatgaataagtagttttttctaaatttttagtaaattcttttaaatcaaaaaagttaaaaaattctaccaatccttgagtaatatttgaatatggtgcttgattaggaccagctccgtttaattttttaaaaatatttaaaataactggttgaagctcttgagaaaaatttttaattattttatttactaaaattcctttataaagacctgtttctgtatctgtatctgttgaaaaaatagcttcaaaattaatttgggaaacaatttggcttaaacctttttttaaaaattcagtatcaactgattttaaaattggatttatgatattagcaattcctacagttttgtagaatccatcagaatctaatttgttggaattttcttcgtatcatttacgcatttctctaaacgcagtatcaaaatcaaaagaataaactattgtttttaatccttttaaaatttcaattggatctaatattaaagtttctagttgtttaggttgcactgagtcaagaaattcagaaaatgagttcaatcctagatttttaaaaattggttgtagattgtaaatttgttgaataacatattcacttcttttatcaactggttgatgttctaatatatcaataaacttatcaatcattgaacctaaaagatcattaattattgttggtctaacattagttgttgcattagataaagaataaactataaatttagaaaataaatcaggatttgagttagttcctaaaaataattggaataaacctgtttgctcaaaagcactaataaatgagtcaataatggcatcaacatcagatttaattaaaaagtttttttcaattagttctgaagttgcaaaaacatcttttagttgattaaataaaatatttgcagttctagttgcttgtaattcgttgatcacagcactagaaggtgcgtataaaattagaggaacattgtagctgttggaaaaccttggatgaatttttaatcaaccatttggaccaatttttccttttaatgttaaattattatcttcaagatatttactaaatttaaccaaagaatcaaaagttaaatctggatcaaaaactcaagtatgttctgtgtttaatttagttacaactccaaaagtattaccacctaaacttattgatccatattctttatttgtttgttcattactaaagactttttgcaatcttacaatcttagtttgaggatgaacatcatctactaaatctttgtttaagaatttaacatcttcaaaagttgtatctacatcaatgtagtttttatctactgcattaccttgaaaaattgtagaaataattgaagctacataaaatggctcaattactgaagtagaagttaataaattatcttttggaagatacaatctcgaagttttgtgttctgtgaaatttttgtattcttcgaataatctacctacatcttgtctttgattttctgagaaaaaatttggtgaaataccagcgttaatgaattgtgcaacttggtttttttgctttttagttacaggatctgtagtagaaaaattagtagttaggtattctctttgaccaatacctgttactacatttttttcttgattttctattttttgtttgtatgttttaagataattcaaaataaattgtttagaaaaaatttcaacattagatttaatttttaaaaaagctaaatctcttacatttggatttgaaagttcagaaatttcttgttcacttaagagtctgatgttattttcatttcctaaatgttcaatttctgcaatggaagttggtttgtcttgtcctttttggattaaaactgttaaatcttgtggaattaatttagatttaaattctaattttttgccatttacagttgttgtagttactttttctcaataattaagattttcaattttactaaattcaagtggttgtttttgtaaatcttctagatatgataaaaaagctcctgagaaattgtttttattaatatcttttaattttcatttgtgatttacataactaacttcaattttagttgtgtaaaatcattcaggttttaagttaaagtcttctcttttaggaaaaataaaataatcataagaagacaactctacattattataagaatctaattgaacaatagtatcgtgatttatttttaatttgtcgttatatgaataatatttataaggttcagaataatttgaagttgaatatgttttagcttgagctaaatcattaatatctaatatttttttgtttgattttgaagcaaaatcagggattttttgttcattttctttctttaatgaaagtaattttaatacttcgctttgcggaacttcataagcaatattaagtttttttcattctaaaattttagctgcgtcaaaacttgcttcatttgtaattaaattcaaatacaaattagaaacacttataatgttttgcttcggattagaattttgatcaaaaagaattatttcattaattaaataatcacgatccaatttaaaaacatgatttggatcagttactttataagtttttttaacaggttgaaaatcattgttgttttgagtatatttaagaaaatattcattatctgtttttaagttagaaactctgaaagtttttttatcagaatctatgttaaagaaaaaattagttgcaaaatctttattattttgaaacaatttgtattcttgcaacaatcttgcagaggaaatataaaaattagaatcttttttattagatcctattaaatccgctaactttacataactttgtccaataacaaatttattaacttcagtagctggtgaattatatactttgtaaacatcatctttttcagtatcaaaaccattatcttttgcatttccgaagaagttaagatccaaatcaactgttgcatcttgaatccctgaaacttgtctgtaatcgtttattttagattgatatgatttattaattgtaaaaagcagggtaaaaatccctgttgttagaaatactaaaatcgaaataccaattaaaataactttatttttagacaatgaatttcaaatgtgtttaaaaatctttttcataattcatctccatctatatttgtcattatcttgataaattattttaaaattatataacaaaataaaatttagcctatttttaaaagcagatttaagtaaacaatgagctatgttgtgctaatttagcttcaaaaaataataaattttacaaaatatttttataaaaatttttttgtgtcatacttaaaatatacactacaaaaggagacaataatattatgaaaattttattaatcgaaacagcactaactgaaaactccactactaaattaatgtcacataaatttattgaattttataaagaaaatcaccctgatgttgaagttatagaatgagatatcaataaaacaaaaattggaaaaatttcactaaactccgaaaactttgcaactttttgaaaagatgtagaagcagataaatacattaaagaactaaaaacagttgataaaattgtctttagtgctccggttattaatatccactactcagcaaatgcaaaaaacttttttgacacaatttgcttagcagataaaacattttcatataaatattctaaaaaaggtgaagcaattggattattagacaacattcaaaatgtccaaattctagcatcacaaggtttttctgaaagagtaaaaatattaaacaaaatgcaagatacaattgcaggaacttgaaaatttttaggggcaaaaaacgtacaacctacaattacacttttctcagctaaaaattttgcatcaaaaaatcaagctctaaaatcagttgaagatcaacttaaaaaagctgcacttactttttaaaataaaggaggaaatataatgaatattttagttattaaagcatctgtaaatgaaaaaaagggttcttattcttcagcccttaatgacaaatttattgaattttataaagaaaaacacccacatgatacttttaaattctttgacttaaataaagaaaaagttggtcttactcctttaactggagaaaatttaaaagaatttaaattctggcaagaagtagactcagataagtgaattgacttacttaaatgggcagacaaagttgtcttttctacttcaatgactaatttccactattcagcgccagctaaaaactttattgatgcaatatctgtaaataataaaacttttgtgtatgataaagcatcagattcatattcaggtttactttcaaatgtgaaaaatgttcaatttttacttgcacaaggtgctccaaaagattgatatccttgaggaaatttagctaattcactaagagaaacatttgcatttttaggtatgcatattcataacaaaccaattgttttagcaggtacaaaagtagctccaaacaatcaattaagcattgctgagtatttaaaacaatttgaagaagaaataaaacaagcagctgaaaatttttaatatctataatttgaaaaaccttcagaaaagaaggttttttgtttgtgttttttccaaaatttcaatattcacttgtaatttattttataaaaaacattaaaaaaattaaatattttaaaaataaaaaataaatttcttaattcaataataatgtaaataattcactttacaacataaaaatcttttaaaatctagctgtgttgataacgttgttataaaatcttattttttgttatcattgtttataaattcataaaaactaataagactttatctaaaataaaaacaattcaaatgtagttagaaaaactaaatagtaaattataattttataaaagcttcaaatctaaagaaaaagtaaacattaatttgttttttttaaaaaatatattaaaatttaaaaactaattaattttaaaatataaaaagcattctttttatgtgaaaggtattatgaaaaaagatatacacccaaaaactcaagaactaaaattgtcttgttctacatgtaatactcaatattcatttagaacaacagtagaaaaattttcagttgatgtttgttcaagttgtcatccattctttactggcgatcgttcattagttagagcaactggtagagtagatcaattcaatcgtagattgaataaatcaaaagaattacaaaaaaaataatatcgtattatttgtaataaaaaatgcaccctcaggtgcattttttattatatgctaatttgaagccaaaatttttattatggtctccatcaattctttagttggcattgttttataactagaaatttctaatttttcagctagactatataaatcatcaatagataagttttcgactttctttcttgcttcagcttcttttgaattttctgattggtgagttgcagttgattttggttgtccatttggattcataccttgaggatttacaaatggattattagatgcattattttgtttattgaataaatcaaagatgtttgcaaaattttctggattattttgcattgctttcatttgttcttgaaatgcttcattattaaatgaattaataaattcatatctaatgaaattaatttttctaaacaagaaagcatatgtaaatgaagttcaaattatagtaataattaaaaatacaaaaaataatgaaacttcaaaattgctatcagtaaatagctgctgtgagttttgtacaatttgtgttaaaactctaataaataaaattacaaataaaacatctgagataataattcacgcacctgtggtagcaccaagtctaatgaaagttttcgctttaaacgaatgaactattgagactaaaaaataaaccaaggatataaatataaaaaacagtgaaattacaggaagagctataatgtctgaattttgattactattggtgttgtttgcagagttgacatttgcttcagcaggcaatatagacaacctgttgttagcagaagcaattcctaataaaatcactaaaattatgttcaataaaaaaagaaaaattattgcacctaaaaaataaaagattcattttttataaccttctgatttactatctcataattcttttacagttggtaatttttcttgttgaaaattaaaattaaagttaggtatcattgtttccttatttgtttattcttttggctaaaaaaattaatttctaacacttggcatattatactataaaatgccaattttttcagaaaataaaaaatggtggagatgccgggagttgaacccgggtccacgcataattaaatataaattactacagtttagttatttttaagaagactctttatctaaaataacaaaaagattaaaaaagcctgtgatctataaattcattaaaaagtgatcagatttttaactattctctaatataaagattacaattcgtgagaagcaaattggtctactagttttttaaaatgcaaaagctagatttgattgagttgaagcattcattaataatgaataatcttcttttttgttttcttttccgcttagtaaagaaattgtcttatggtttacaagaccactgcaatttatatccttttatgtatgtcgaagccagtacacccccatttttatgttcttaattataacactttttttctaaattaataacccatttttttgattaatttcgcatcttttaatcaattttgggattctttgactttgttaattaaaataactttttgacctagcttttcttcgagttcaattcttgaagctttgcctattttttcaagcatacgaccattttgtcctactactattggaatgtgagattttttagcaacatatatcattgcactgatataaatttgttctttttcttgatagttttctataaaatcattgataattattgcaacttgatgaggaatttcttcttcaatatttaataataagtgtttacgaataatttctttagctaaaaacctcattggtctatctgttaaaaaatcagcatcaaaataattttcactatcatataaatattttttgatttcttcaagtaaatcttgtttgctaacttgatatttttctgaaaaaccaagaactaattcaaatccgagttgtttaagttcgtttgctttttgtgcaagaatttgattatcttcttctaaatctatcttggttaaaattgcaattttatttttgagttttaaaacttttttagctaattcaatactggtttgatccagttttctattaacagggtgtaaaaacaaagcaagatctatatcttcaagtgaagaaatagcatttttgtttaaaaccttggaaaataaagaattttcgctttgaaatccgggtgtatccacaaaaactatttgaaaatcatcttcagaataaattccattaatttgatccctagtagtttgtggtttgtaactaacaattgaaagatcataatctaaaatggtatttaacattgttgattttccactatttggtaatccaataatagaaacaaagcaagttttcattaatttaagaactcttttctaaatgctaaaggtaaaaattctactaactttcttttttctacagcacctgtgatactgtataaataaacatcagcatcatattccattaattcaatcataacttgtaaacaagcagcacaaggtttaataaattcttttgtgtttgctaagatatgaatttcttgaatttttccaggaataaatccatatgttattgaagaaaataaagcatttctttcagcacatagacctgatggataagctgcattttcaacatttactccttttcagatattaccttttgcatctttaattacagcagcaacaggaaattttgaatatggactataagtaatttttaataatttttctaattcttgaaacataatttatctttctatttgaagcaatttcataattttatcaacttttttgttcatttgtttttcttcttctaaactaatgtgatcataacctaataaatgataaacaccatgtgtaaataaatagcaaaattctcttgtaactgaatgtccgtattctttagcttgttgttgtattttttgataagaaattagaatttcaccaagaaatttttccttcataaatgaagtagaaaagctattaacaaaaggaaaagataaaatatcagtagttctgtcttttcctttgtattgaaaatagtattttcgcatttgttcatcatcaattagagtgaaatctagtgataaaggtttttgaaacttttcttctttttctataatatttaatattaaattaaacatcttaagatatctaaatctatattttgttgtatttaaaaaatttatttgacttttcatatttttttaaaattataacaaaagaaaactaagaaaagagataaacaaaattattaacttcttttaaaactaaaaatgcattgtaactagtctttggtttgagaaaattcaatttagaactaaaaaataaatttacttgaaaaatatcattagaaatattattaatttgtttgatttttaaataaaagtcttgttttttataacttaaaataacatatgcatctttttttattttgtataaaagatcagaatttatagtaaaagaaagctttttatagtcgtcaacttctattttgatagctactttattatgaaatttaagtcaataaaaataatataaaaagataactaaagaaatcaacaacagcgcaataaaaatgaatcaatatcatttactaaacttataaagtttcaacatttatcacccttgaatcagaaaataaatatcgttttgaatgtgatacttcaataaaaatcgcgtctttttgaaaatcttttatgattttttttaggattttaaaattttcttgagaaatattttcaaatgcttcatctagtaaaatcaagtcaaaattctttgttaaaagttgtaagcagttaattatttgtttttgaccacttgaaaatttttttgcattatcgtataaaatatcatctagtttaatgtctcattgttcaagtaatggttgcaaatcataattttgaatattatttaaaaaagtttcaacctttttcttttctgcataagtaatgtaagaaaaaatatcagtttttgggaaataattttcatttttaatatataaaatttgctctcttaaaaattctttattgtaaaaattaacatttaaatcattgacaaaaaaatctcctttataatcttgatctaagtttaaaattcttaataaagaagactttcctgctccatttctcccttcaagaattaaatttttatcaattattaggttttttatactaaaaatttttttgtaaattatgaaattacatgagagttgtttaagttcaatttttttaatttcttgaagcttttcaccaattttttctctttcaacatttaaaatgaaatttattgcatctatttccttggaaattgaaggataaacagcaagcatttctgaaatagaatttaaaggattaataaaaaaactaaaaaaagaaataaaaattaataaagtaccaagcgaaagtgtattgtcaaaaattcaaaaagatgtgatataaactaaaaaaatcggtgtaattacaagaaaaaagttttgtaactgacttaaagaaaatttaagttttcaaattgagaactctttatttttaaagctaaaataagaattgtcaaacttatttttaagcattttgtacaaatcattattttttagattcttcaaagaaaaaataaaatcatttacagcactaattgattctgtattggtttcatataaaaagttaatttgtttagaaattaattttttaaaaacaaaagagataaataaaaatacaatacttatggctaaaataataagaaataattgtcagctaattcataacaaaataaaaaatgaaagtaaaaaagtaacaagttcattgaatatgttaaagtaaaaatgtgaagaaaatgaagcaaaagtaggaataaaattgattcttttcaagtaatctgctgcatctaatttataaatttgttgatttatccccttatttaaagcaattaagaatttgtcaaataaatattgttcttttttaatttgtaattttttaatataaatttgcttgataatatcttgaacaaactttcaaataaaaatccaaagaaaaaataaaactactttatacaacatatcaatttgtttataaggtaaaactttatcaataatagttttaagataaaaaatcgaaataaaatttaaaattgcagaaataaaaatcaaaaataaaacagctcaattatttcgatcatttaaaaaataaaaaatactatttcattgctgtttttcttcttttgtaaaggaaaatgaagcattttttgaagccatgatgacaatatttaaaaaatttgcttcaaattcttgctttgttaatttaacccttccttttattggatcttgaatataaaaaatgtctttttttattttttctaaaataacataatgattaaaatattcattttttagcaaaatagcaattggagagtttatttttaactcaagcaaagtagctaaattacaatgaaaagaatctaaaataattccaaaatgatttgctaaattttcaagattttttattgaaattccttgctgattaaaaaaggcttgttctttgattttgctaagtttcaagtctttgtcatataaatatttagaaaaaaagtgaattattgaaatcccacagtcttttatatctgtttgttgttttattttcattttcttaatttgtaataaaatataaacaatttattaaaaagggaaaatttaagtacttttagaagggtaattattaaaaatgtttaaatttaatagaatttttttaattgttactgattcattaggaattggtgacgacggtagacaaaaagaatttcaagatgaaggagcaaatactttatatagtgcttcaacaactaatttactagaaattccaacttgaaaaaaattaggaattacaaatattgcaaaattagaaggacattataaaaaaaacaaagaaccacaagcatatatgggtaaaatcattgcaaaatccaatgccaaagacactcttgcaggtcattgagaaatgatgggtatttggaccaaagttgctaatcctaattttgacaatggttttccaagagaattactagatgaactagaaaaagaattcgatggtagaaaaataataggaaataaatccatcagcggaactgttattttacaagaattaggtgatcaagaacaagatgataaaattattgtttatacttcaccagattcaactctacaaatctgtggtaatgaaaaaacaatgggattagataatctttacaaatatgccaaagcagcaagaaggatttgttcttcaagacctgagtgaaatgttgctagagttattgcaagaccttatgtaaaagaagatggaaaattcattagaacttttaacagacacgattatgctaatagaccaccacaagaaactgtattgaacagacttcagcaagcaaatattaaaacaattggtgttggaaaaattcacgatattttttctggatatggaatcgatcaagtatatggtccagctagcgacaacgaaaacatggatgtagctataaatattgcaactacagatagtaaaaatgagtttatttttgtaaatttagtagaatttgactcaagttatggacacagaaggaatgttgtcggatatgcagaaaatgtaaataattttgatatcaaattagcaaaactaattaatgcactaaaagaggatgatttactactaatctcttcagatcatggaaatgatcctctatttccaggaacaaatcacacaagagaagcgcttcctttaacagtgttttctaaacaatttaaagatatgaaaaggggattatcaactcacattgactcacttgcaactattggaaatattgtggcaaaaaacttcaaaatcaagctaagtgatataggtgaagatatttttgacgaattaacttaaaaggcaaaaatgacgcaaacagaaaataaaaaatacccttttagtaaacgcagaattcatagaatggaaattattagtttgctttattcttatgaactatttgacaataaaataaacactaatgaaatattcaaaaactatgacttaacaaaagaacaaattaaaattttagaagcaattgaaaaaaaatatgaaatttttcaaaaattaattatcaactttttgggttcaaattgaagttggaatcggattttacctttagttcgtgcaattttattattaggttcttttgaacttttagtaaatgataacaaagttgtaattaatgaaatggttcaaatgattaaagactacactttagaatccgataaagaatataaatttgtaaatgcagtattggataaaataaatcaattttatgagcaagaaaatcttaaagtatataaaaaaacaactcaagaacactaaaatatgaacaaattataaaaaatattttagaaacaaaaaacagagatttccttttgtttttttagatgaactttttgatttagaactttcagaagaggaaattttactttttgaatctaatcttgttttagttaaatcagaagaaagttttaaaaaacaaatttttgattttttcaaacaaactctttataaaataaatcataaattgcttctttctaatttagcaacctttatttattattccactaaacacaacaagaaaaataacttcgaaaatgaagcaaaaagaagaaattcttttaataatttttcacttttaatggtgcatgtttcttctgattttaattcatatgttattagtttactaaaaaaatttaaataaattattatgaaaaaaagcattaaagaatacttaattgagaaaaactactccaatgctgaaattttaattcgttcaggacaagttaaaatcaataatgaagtggttttcactcctagttttttaattaaagatagcgatgaaatactaattgagcaaaaaaaagaatttgtttctcgtggtgcttataaattgctcgccgctattgaagcttttaaactagattttgaaaataaagttattcttgatattggtgcatcaacaggtggtttttcacaagttagtttaaattatggagcaaaactagtttacgctttagatgttggtaaaaatcaactagattacaaattaaggcaaaattcgaaaataaaatctctagaacaaactaatttaaaatctatttcaaaacaaatgtttgaagttgaaattgataaagtagtttgcgatgtttcatttattagtttaaaagaagtttataaagttgttgagcatattctaaaaactaatgatgatttgattgtattattaaagcctcaatttgaagcttcttcaaaatacgttgaaaaaggtggttttgttttagaacaatttcatccttttttaattgatcgaagcatatcacaagctagtgaacataattttaaatttattgataaaattacttctccaattaaaggacaaaaatcaaaaaatacagaatatattctttgatataaaaaaacataatgaaatcttataaaaaacaatttcctattttaaaaacaattacatattttgactcagctgctttagtgcaaaaaccactatcagtaattaaagcaggtgctgaattttatacaaaatttgccattaataatcattcaaaaaattctaaattaggcttgattattgaagaaaaaattgcaactgtgcgcaaaaaaatcgctaaattaattcaagcccaatcagatgaaattatttttacttcaggaactactgagtcaattaatctctttgctttaatgattcaatcacaaataaaagctaatgatgaaattttattgagcaaatataatcacacttctaatttaattccttgatttaatatagcaaaagcaacaaaagctaaaatagttttatctaataatttagaaaaagatattaataaaaaaacaaaaattattgcttattcacaaaaaactaataatataaatataatttttgatcaagcaaaaatttacaatttagctttaaaaaacaaggctattgtagtaaatgatgcaactcaagctattaattctcaagaagtaaattttaattattttgatgttgttgcttttagtacaaataaattatacggacctacaggtttaggaattttagctataaaaaaaccgcttttagatactttagaacctataaaaacaggtggaggaacaatttctactattattgatagccaaaattgaaattattacaataatgtaaacaaatttgaagcaggaacactaaatttatcagctatttgagagtttgaaaatgcactaaatctaatagaaactatagggattgcaaatattgaaaattatttaaaaaaactttctttttatctttttgatcaattaagtcaaattgaaaacatacaaatttatagcaaaagaggggatagtataattttatttaatattaacaacataccagcacaagatattagttcctatttaggacacaatgatatatatgttcgaagtggaactttttgtgcaccattaatttctcaaatattaaatcaagattcttttgtcagagtttctttagcactttacaatgataaaaaagatgttgataaattagtacaatacttaaaaaaatacgaagggtttttagattttgtataacgattttaactacagaagaaaaaaaattttagaaacttattctaatccaaaaaataaagttcaagaattaaatccaaattgaaaaactattaattcttttagcacttcttgtgatgataatttagatttggctttaaaaataaaggaaaatgctgtagaagatggccaatttagagctaggggttgctcactatttatagcttcgagcgacattttacttaaacaaataaaaaataaaacatttaaacaaattaaacagctttttgttgattatgagcaaatgttagatactcaacaaataaacaaaaaattaaatgatttaaatgtttttgttaatacaaaaaatcacttaaatcgacttgaatgtgtcaaattagctaaaaatgcgattaaaaaaataatagaagaaaactaaatatggaagaaaaaattcaaaaattaatttcacaaacaggctattgttcacgaagaaatgctgaaaaattgattttacaaaatcgagtttttgttaataatcaactagcaacaattggacaaaaagcttcttttgatgatgaaattaaaattgataatcaaatacttaaaaaagctgaacatatttattatgctttttacaaaccaaaaagagtggtttgcacaagagaagataattttaatcgtaaaaaaatcatagatttctttcctaaaaaagaatatttgtttcctgttggccgtctggattttaatacaacaggaattattttattaactaacgatggtgaattagctaataaactaatacatcccaaatttcaaattgaaagaacttatttagtacacaccaatggtgatttaagtgatgagcaaattaattttgctaataaaaatgtaattaaattaaacaatgaaattaattcaagacaaataattaagaaaaaagcaacaaataaatacattgttaaactaaaacaaggttcaaatcatcatgttaaaagactttttgatcattttcaaatagaagttttagatttaaaaagagttcaatttgcatctattaatcttgcaaatttatcacttggtcaatatcgaaaattaacaccaaaagaaattaagtatttaaaaaaattaactaatgcaaaagcaaaaaactaacttagctgttgattaataaaattatttatttgactaattcctatttttttagcagaagaaactaaaaagcattcataatttagctcttgaattgctttggtaattttatatttttgactttgattgattttatcaatttttgtagctattattaccacatttcttttgagttgctttagaaaatcaagcatttgtaaatctaaagatgtaattcctacattagaatcaataagtacaaaagttatttttaaattagttcttgatttgaaatattcttctaacatagaagaaattaaagatttttgtgaaatagaaatttttgcaaatccatatccaggtaaatcaacaattacttgtttttgttgattataaaaaaaattaattaactgagttcgtcctggttgttttgaagtttttgctattttttgatttgctaatgcattaattaaagaagattttccaacgttagaccttccaattaaacaaatttcttgtgctaaatgttcaaatcaagaaaatttatcagcagctgattttataaatgttcacataatttttcctttgtttttaaattttaagttaatataaaaataataaaaataaaaaccagaaaattatttcgtttctggtttttattttctttctttttctttattttgagaagatttttaaagcgttttgtgcaattaagagctcttcatttgttttaattacaaatacatttaaatctgattcttctgttgaaattttttctacatctgcaaattcagataatggtttttcattaactactttatcgattacgatattaaatttaggaaaattaatcttgcttaaaattaaacttctaacaagagctgcattttctccaacaccacctgtaaatacaattccgtctatgtcttttcctattttattaatgtaatttactaagtagtcagcaattttttgtgtatatagttcaagtgcaaattcagcatctttatttccatcttttcttgcttgaagtaagtctctaacatcagaagaaattccagaaacaccaaaaagacctgattttttatttaacatatctatgaattcattaagactcatttttgtttcatttactacaaattgatgaatggaaggatcaatatctccacttcttgtacccatcataactccagcaagaggagtaagacccattgaagtatcaagtgattttgattctttaatagcacataatgaagcaccatttcctatgtgtaaattaacaaaatttactttgtctcttttaaatatttcttccattttgttagttatgaatttatgactaattccgtgaaaaccatattttttgatgccatgatcttttgcaaaacgtgagttaattggatatgtgtggtttacagctggaatacttgtgtgaaatgctgtatcaaaattagctgaaatttttactttaggtaaaattttttgaattgctttaatggattgcacagctcctggattatgtagcggagcaaattttgaaagatcttcaataatttgaatttctttagatgtaagtgcagttggacctgtaaattcactacctccgtgcaccactctaaatcctgcaatttcgatatcattaacatcttgaataattgcattttgtaatcaaatcttaattaaaattgacattgcttctttatgatctactacatcttgatcttttaatcagctttgatttcctaattttgttttaaaaaatgaacctgctattccaattctttcaacaattccgcttgagtgtaattgcatattttctttagaaaacatagatcatttaatagaagatgatcctgcattgataactaaaattttacttgacattattttgttccttctgcttgtagtgctgtaattaatgctgtgttgaaaatatcttcaactgttgaacctctagataaatcatttattggttttgctatgcctgtaataattggtccaatagctccaaaaccacctagacgctgagcaattttatatcctatatttcctgcatttaaattagggaaaatcaagacatttactggatctaaattcatttcacctttgtattttgcttttctaatttctaaatccattgctgcatcgaactgaatttcacctagagcttttgttgaagcattttcattataaagctttgtagctgtttctactgcttctgcttctaagcttttacctgaacctgaagttgaaaatgataaaaaggcaacatttggattaaaacctaaatttttagcaaataaagtagcattatgtcctatttcagctaattgttctgaactaggagaaatatttactgatatatcactaaaaataaatttttcattatttttgtgcataatcataactgaagaaattgttttaattcctttaactggaccgataactttaaaagctgctcttaaaatatctgctgtaggaaattcaagccctccaattactccgtcaaccaaaccttttcttaataacatacatgcataaaaaggaagggttttcattgcttttaatgcaccttcttctgtttcttttccttttctaaattcaaaaaattcctttgcaaataattgaatcttttcttctgataatacttctaattcaacaccttctgaatcaaactgtgtttcagaaagaagaattggataaactaatccttgagattttaaattttttgccgctttaatagctcttggatcttttccatcaattattaggatttttttaacacctgataatttttgatttgataaaactaaattttctaattctttttgataactcataattgtcctttaaaaatgtaaaaaattaatttaaattataaattaaaaaagttttatgtttaaaaattcaacaagataaaataaaaataaataaatttttaaatgttaatttttgtggtattatatatgagcgtggtcgcgtagctcagttggatagagcacgagccttctaagcttgtggtcagaggttcgaatcctctcgtgatcgccatttttttattgccttttttacaattttatttaaaatttaagcaaaatttagtgaatttttaaaaggaaatgtaaaaaattaatgaaatataaattcaaacttctcttgctagctttatctccattgagtataacaacattgattgcttgtcaaacacaaactcaacaaacaaacaaacaaacacaagaatcaacaaatgcaacaaattctaaaaaatcagcagaatctagtgaatcaaatgctgctaattcaactccaatagttcagcaaaaaaatgtggaatttaaaggattttataattttaaagactttattgaacctaataatggatttgttcataaaaatttctttactaaaaaactagaaaataataaattcgaaaaattttatagattttataactttatttatgaagataaatgaagaaaaaagaacaacaaattctactgaacaattgatattaatgaaattgaaaaagttttaaacaaagacaaaaatgttgaaaatcctactttatgattctatgttgatgtacgagataatattgaagatttagataaatttcacacttctgcaactgatagagctgttttttcaggtgttcctaaatttgagtttaaaaatcaattaaattatatgccatttggaagtcaaaataaatataattcattatctttttctataggaattagctttaattttgaagaatttttaaaacaaaaatatgcaaaatttgaacttaaaaataattatgaaattgaagcaaaactagaaaataacgagataaatttttatctaaataattcaaaatcagaacttagtgacgatataacttatgttagaaatctttatcaaaattatcaaaatcaattagataataacaaaaaagaaacaaattcaaacacaaacgattcacaatctgaacaagaaaacaatgttgaaaaacccaacacaaaacttataatgccaaataattcctttgtgtctttgtcttatataacagataacaaagaaaataagactttgcaaaaatatgtttatcctagtcaatacaatcaagaaactattaaatatgacaaagaggataaaataattccaaatgacgataaaagataccaatgattaccaaaaacagtggatatttttccagatgattgagttagtttagttgatccagatccttcaaaaaccttcaaaaagaacccaaatgcatttgataaatccactcaagaagcagaaatttcttttgatcatcctttaactagaaaattagataataactttgtcaactcattagaaagaattcttccttataataaattcgatccagaaattaatgatttacaaataagaagttttggaaatcgtggaacttatacaatgatttccaaagtaaaaccaaatgatgacaatgatcaaagatactatgtcttatccaatagacatgttgttgattctatttgatctgatgttgattataatgaaccaaaagaaacaagagaggaaaaattaaaaagggcaaaaacctcaacttataattgaccactaaaaaatggcgaagaattaactaataatttaatttataaagtacctttaaaacaatgaagtaaaagacctttgtatggaaaaacagaatttgaaactaaatataatgtctcaacttctaatttctttgatagttttttaaaagttgtttgagttcctaatagtatcaaaacaaaacctgcacaattcaaggataatccagaagaaaacaacactaatgacacaatcgatattgcaatttccaccattgatttaaaagttgtttttaaacttctcgatagagctttatttgatcaaacttcttcacttccttacataactgatccagctaaaaaacaagaaaaacaaaacattattgattgattaacaggaaccaaagaagatttagaaaaatgaaaaaacctcaaaccacttaaatttggtaatgattttgcaaatctaaacaacggtgattatttaactaatttttacatttcagcttatccaagacaaagaacaaatgttgtttacaaaattaacaaaattaactttttagaatctagaatttcttatcataatgattattatttaaacattctcggacccgatggcaaaccagatttaaaccaacctgggccagcacgtggaaatggattaataggtggagcttcaggttcattaattgttgatcaaaaaggttatattcaagcaattcatagtttagcattagatacttttggtagttcatatgaattcaacaatgctaccgatgttgcatacccttttataagtcatttaagagatgttatttcctatgataaaaacaatccaaatacatttggttcttgattaaaacaaaaagctgagagcgatccagaacacttcgaaaaactagatatttatataaatcctcaaaaatactgaaaaaattaataaaaatagtaaaattttaagttaatgaaactcaagaaaatagccctagctctttttttatctccagcactagttcttgctagttgttcttttaatacttccttaaatactttaaacacccaaactcaaccaacaaaaacagatgcttcagcatcaaaacaacaaaatcctgagcaaaaaactaataataaccaaaatactaattcaaaagaaccaataattaagcaacctacttccgaagatgatactaaaaagcaaactaacaaccaaactccaacaacaaaagaggaagctacaaaaaaaaataaactaaacaatccaactaatcaagattctatttcaaatgattcaacaactaaagatagcgaatcaacaaaaagaactgaaccaactcaagaaactaagcaacaaccacaaccagaaactaaaacagagccagaaaaagaaaaaaacaaacaaaatcaagcaaatacgcaaataaatgataatcaaaataatgattcaaacaacaatacatcacaaaacaattccttcaaagtaaatacatctgataatcaaaaaaactctgaagaaaaaccagttgaaaaacttgttgaaacaaagcattacgaaggtaatttttcaaaagttagtcttgatcaaataaataaaaacatcacttttcctgaagaatacaaaaaaataaaagctaattacgaatccggttttatagaacaagaaaatgacaaagcatttttaggaaaacaaaatgataaattatttgtttatgatctaaaaaaatctgcaaataaagagcaaatccttgcaaaatcctacacagaacaagaaaaagattcatactttaacttaaacaaagaaattaataatgaattctattctattttccatacacaagataataaaatatgaaacaaagtagaaaaaatcgcttttgaatcattaccaagtgaagatactcgctttgaagatatttacgaaagaaatttaagaatttctataggaacttcaacaattttagacacagatggaaacagtgcacttttagttactaacaaacacgtaactcgagcaatgaaacttcaagatgttgatcccaaacttgcttcacttaatattaaaaataaagaaaatttaagattttataactacatattaaaagattttttcaaaatttactttaaaaataaattctatacaatatcaaatgatttatttattgcttgagaatgagaaaaatataagtacaacattatttttaattcaaatcaaaacaatacaaaaaatactaaaaaaaccttcaccgaagaagaagccttagattttgaaattaatttatttaataaatattttaaagttataactaattttgataataaaaaccaagatatttctttatattacttcaattacaagcaatatatcaaagactgagaagacattattaaatgaattttatctttttacactgatgaaaatttaccaactattgttaatgatcaagataagaacacaaataatcagcaacaaaaactaacaacacaaagttggctacctaaattcttcgatatgagtggatcattaaatggcattattcaaactaaagaaggaaaaagaagtaaaaattacttcacaagctcacaatcaactaaatccaataatgaaaataattacaatattacaaaaaccaaattagtattaagtgctaaaggaaaagaacaaatcaaaaatgaaatagaaaattttaacattttcaaacaatactgagatcatatgtctaagttaaattcagtaaaaatagatgataaaatttgaaaagaaaatgaatttgatgatagtttaaaaataggtttattctgacctaaaaaagttgcgtttaaaaatgcttttaaagggataaaaattagttcagtacctatttttggaaaagatgaaaaatatctaaatgtattttattatgcaaacaatggacatggagcttctggagctggtatttttaatcgagatggttcacttgcatttataaactcttttggctttttatttgaaggtaaagatccccaaactaataaaccaatttcaaatcttttttatctagattcaaacttaaacactttcttatcaggaggagttgttcttcacacagaacgttataatttagtagacgaaatatacaaattttattttaaaaaacaaccagagataaaattaataataaaaaatgaagaaaaataaaggaaattatgtcaaataaatcaatatacttgtttgttttagacctagatgggactgtattgtctaattcagcaactggagaaattcacgaagaaactgaaagagaaatcaaaagagcaacagcattaggacacaaagtgtgcattatcacaggtagaccttgaagatcaactaaaaaaatttatgatcaattaggtttggatactattgttggaaattttaatggagcttatgttcataatccaaaaaactataattttattcctgaaatcaaatatttaaatcttaatgaaatgctttatattctaggtgataaaaaattaagatcagaaataactaatttagcaattgaaggtccaggatgagctaaaattcaaaaaagagatgaaaatcttgaaaaagtttttggatttaatgaaattcctaacttaaaagctggaattgatcttaaaaaaattcctcttaaaccaacaggtgtaattttagatactaaattaactacaaatgttgcagaacttaaatcatatctagaaagaaaatatggagatttaggtgaattttccgcttgatcaaaaggtgaaggtcaatcttatgtttttgatataacatcagttggagttaataaatcaaaagttgtttctatgctaacacgttattacaatattgaactagataatgttgtttcaattggcgatggatttaacgaccttgggatgtttgaaatagcaacagtttctgtggcaatgaaaaactcagatcaggatttaaaaagaaaagcaactgttgtgcttaaaaaaaccaacaaagaaggtggagttggttattatattaaaaagtttttaaaaaatcctgaaaaagaaattgaaaaatcaaagaaaatgaagtctttaaagtcttctttagctttagatattgaagctattggaggacaataatatggaactgccacaaaaaattgccgtctttggaggtacatttaatcctattcataaaggacatattaaaatcgctaagcttgctattaaaaagcttggtttagattctttatactttgtaccaaattaccaaaatcctttcaaaaacaagcaacaatcctacgttagtggtgaacatcggtacaatatgattaaattagtattacctgaaaaagccaaagtttgtgaatttgaaattaacaaaaagggtattagctacacaattgatacaatcaaatttttcaaacacagatttaaaaatgcacaactttacttcataataggctctgataatttagaaaaacttcacaaatgaaaagacattgatttaatttgtcaacttagtcaaataattgtttttaaaagagataaaaaaataaataagaaaaatcttaaaaaatataacgcagtcttatttgataacaaaatatacgatttttcttcaactaatattcgtcattctgattttagtggattgtttcctgctgtacacaaatacatttcttctaactttttatatatagaagatttattaaaatttcatatcaataatggagaacgtttaaaacattgttatgctacagcacaattagcagctgaatatgcaaaacaacttaaaaaagatgccaaaatagcttattatggtggattattacatgatattactaaaacatgatctaaagaaaaacatagagagtttttagcacaatgtgatgtagaccaatctaaggtccctgattacaaactccaccaacttagtgcttatttttggttaactaaaaaatataaaatagcaaaaaaaactattgctaactcaattgcgtctcatacatctttagcttatgatatggatgattatgccaaaatcgtttatatggccgacaaattagcaagaggtagaaaatatcctggggtgcaaaaacttagagaactagcaaaaaaagacttttatcaaggatttaaatccgttttagaagctaatttaaagttattacaatctgaaggaaaaattgatgaagaacaacaacaaatctacaaattctgaatcaatagttaatattgctattttatttgcagatgaattagaatttgtagatttaaaacaatttagcttcataaatcaagcaaacaaagttacaacaccttatggaattggttatatttttaactacaaacaatataaaattcattacttccaagtagcaattggtttaattaatgcagctgcagcctgtcaatatttaattgataaatacaaaattactcaagtgtataattacggcgcagttggaagtaatgatatttatttagacttaggttcaattctttatccagataaaatttatctttgtgatgcacaaactccttgatatgattttggacaaactcctaaagaaaaaaagttttacacaaatgattttgattttactaataaaaacatcaacttaggttcttcaaatgcttttatttatgatttagatagattaaattttattaaaaaacacatcaatgtaagtatttttgatatggaagcttttgcgcttgctcatgtttgttttaaaaacaaaattagtttcaaaactctaaaatatgtttctgattttatagctaaaaatttatcttatgaactagtaaataacaacatcaaaaatggtgcaaaacaagcacttaatcaaatctttaatttactataaaaaataacaaaaaaatacacttgcaagtgtatttttttgttattttaaatcatcttcaattatctttttaacttggtctatttttgctcttttttcttcaaaagaaaggttttgcgctttgaaatcctgtgtcattttaataaaagcaggatgataaccaatacctaaaggtttttcaaagactttatttaatctaattcaactatctcttaatcttgtataaacaattttatttggattatttttgtagtttttgagtaaatataaatgagtaattaaaacaataatacctgtgctgtttataacttttttaaatgttctatttcagttaacaggaatatagaaaataccaataactaccaaacaaaatgaaggagcaaaagttgaaacttcaagtttaccaattaatttaatagcatcttcgctagggaattttggtacttgaataaatgcattaataaacaaaggagtaaagataaataagattctaattagtaagttaataaatgtaaatatcgaattccaaatataataagcaactaatttgctatgatcacctttgtttttgatggtgttaatataaattcctaatagaataacaagcagaattatagataaaatggaaatataaataacataattttctactctatagttttgaaatccacccataattgttcaaaataaaaaccaaaacaatgaaacaaataagatagctaaagttttgtaaattgatcttgacaaaaatgacattttatctcaaaggttgtcaccactttcttgttttgttgaaggatttttttcagatttttctaaattagcaataatatcactatttaaaattttaaagtttgaacttcaagctactaatttttctttatagtcttttttagaatcaacgtcttctagatgttcgatagaattgattttagacatttctgataaaaattcttgctcttcttttgataaattaatatcgttttgaatttctgtttttttctttttagtttttgaaaatattttagctaatcaattttcttttttagcttctgcttttgcttctttttctgaagttggatgattttcaaattctaaatgagtatgtgtttgtggaaaggaattatgggtatgagttggttgagactcgttgtgtttttgctcatgtgcatctaaggttttttgatgttcatctcattcaatttcttttgttatttgagcttctaattcattattgaatcatttttctctttcttcatcagaaatttggggtatgttatttggttgttcaattaaaatatcttcatcttgttgttctgtgtaatcttctttttcatcattttctaataaaaaatcaagattttgtctgtataaatcattagttggtctttgttgataatcttgagagtcatcatcgagcttgatatcatcgaagttttcttttactggagttgattcatcttttaattgttcatcatctcgcgagtttttctttttatttataaatttaaatttcatatcttttaattttatattattttttgcaaaataaaattatttaattactaatgattatcatcatgaccatttctaatttgatggattattctatctttaattcttggatatacataacgctcaaaacgatctgcagaacctgatcaatacaccataggaactaaatcatcttttagataattggtgttatttcttcaacttttaaataatcaaccacctgttggtgtatattttccataaaatgctttaattaaatttttaatatcattatcatgtgaagacgttagatatttataaacttcagctatacctgtttttgcatttaaatcttcttttcaaaatccatttacttgaacaattgaagatgcatctctaaacaattcttctcaaacagttaataataaaatagctgttagtcggtaaatcattctaccttctggataacgtcggtagttatcttttctaatttgctgtccaacgtgtctgagtttgaaatcatcataaatatatttaacaaatattccaattttattaagatttatttttgttccgctaccaaaatctcctggaggtaattgacctgttcaagaaatagcttggtgttttggatttaaagtattaaagtgatttaaaattggcgaaatattttcttttttagtgttattttgattgtttcaatcagaagctgttataaaaattaaatctaagaaattaactaatgtttgaattttaatttttgggtttttaggatctggatggtgcggattttcaattgcatcaattaaagagaatattttttctgtgcttaagaagtttttatcagcaaaaattgaagataatattgaagaaattttagaaatactaatttcttgattattttttgaaaattcaacaactaatttatcaattattgaactaactagtttgatatttcttgctgcatgagctatatttttaacaaaatctttgattttttgtttatcttcgcttcttgttaattgagtaagttttaattgatcttttataagatttacaaaaacatttccaacttgatcataatctgaaattttagctaataaatcgtataaatagtctttaaaaagttgtttatgttttcttataagtataggaattaattcttgaacagattttaaagaagaaatttcttgattagttaaattcattgatcttactaatgaatcaacaaatttggctgttctatctcaagaaataatatctttaattattggtctaatttgagtctgagatagtgtattttttgtatatttgtttttatctaagaaacttaaatctagttttgcaatttgttgatctacaaactcagattttagtaatttgttaactaaagaaactaaattatttttctgctgagttgaacttgtttgattaataattaataaaagttccttcaagaaatgaagcatttcttgtgaagtaaaactaatttttgcatctggtttattagaaagttttgtgattactaaatcaaaaattttatctaaaacaatatcaaaagaacttttgttagaaagagcagaattaacatctataaatttatgttttccagaaattaattctttaatagtataaattaaaaaatctgtttctgttgggctaatttgaacttttagttctacttcaaagacttttctaaatagatttctaacttcatttgtatcaatattttcttcaattaattgttttactatcttttttagatcttcttttttgttggttaaaaacttcacaaataaagaagaaaatgattggccagttggataatctgcttcattttgtaaatcttgtttgttatttttaaggtaatcaaaaactaatttaataacatcatttattctattagaatcaattaatttatcaactaaagtataaagttctttacttaataatgaattatatttttgcgaaaaactagaaattgattgtttaagttggtttttggcaatatcgctttttaataattttctaactacacttgctaatttttcataattactagatttgaactcattattgtcaacaatttgtgcaaaatcaagaattaaattaataatatctgaggttttaaaatctactttaaaatcttttttattatctaaataagcaattaaaaacttatgaatttcatctaaaattaaatttacagtttttaacggtctgtagctactatcatttttatggacttcattatcaacatctttttgtagtaaagctctaattacatctagtattgtttgaacattatcatcactaaaatcaatacctaaagatttaaagtttttgtgaataattgaattaattagtgaatgaatataaggttgtttaatattttctaaagtaaactctttgaatgcttttttaatttcatcttttttagttgttaaaaattgttttagtaagttagttatactaaaattattgtcatccacattaaatgtggaagcatattttataaataaatctacaaaacttttaaaagaagctgatgaaataactgtatcgtaaagattattaaaaataccttgtgattcttctactgtttttccttcaatatgaaagttaatatatttaaaaattaactttttaactaaatcagatcttaaaacttcattacctaaactaaaaagtttgtcaatggtcaaatcaggattgtgagaatcttttgatataaagctaatttctcttaataaattaacaacattttcttcggggaataattttgaaattgaaaaatacttgtcaaaattgtcgaagtttttttcattactttttaaatatgtaataattgcagttcaaaattgatcaagagttgattgaattactgaaggaatttttttgttttcgtgtggaaaacgtttaagtaaagcttcaaataaagcaattaaagtacgttgtgaactatcacttaaagttatgtattcattagatgaaattatcttttttaaaattgagctaaatttttgattttgaatattttcattaataaaattataaataattctttcaatgaactctcttcttcttttgattcaagttcctaaaaattgcttagcagtagttaaattatcataatcttttttatgattaataaaaaagtcatctaaaattaattcaacagtatcttggatactattatttttagataaataggacaaagaaagcgaaattagttcttttagattttcatctttgatatctgcaaaattataaatagctttttttgtttgatcatttgttagaaaatcataaagtggtaaaagagcttcttttattatatttaattgtgaaacattaatgtttaaattatgtaaatcatttaataaagttgtaaaagtttcttcagttactaaagaacttgcaactttttttgatctttcaataattttgtctataactttaaagttatatagttcttcttttgttgctgaattaagtacagaaattatttctgaagtaaatttttcttgaactactgaaaataatttagtattaagaatttgatcactaaactggtgaactgttgaaacaatttgttctaatgtactttggtcaatttcaacatttaatgctacagaaattcacttaataattgatgaaataactacatcattttttaacatttctccagaaaaatttacaaaaaattgtttaagttttttaatattttcttctttggataaaaaaatttgaaaaatatcagaaagttgattaatttttaaatattcatctttgtgatctataagttcgtccactatttgcttaaagaattcataaaaagactgaaagccaagaatagcgttgacagttttagtatccaattgactttgtaaattaaatttcgaaaaaacaaagttaataatatgtttgttaataaataataaatccaaaactactgacttaaattgttctttattttcagttatcaattttgaatttaaaatagattgcaaaaaagcaattaaatctttgtcatttaatcctttattttttacgtaatttatcaaactttcaaaagtttgtttttcattagcttgcaaaacgtaagattcaaaagaagctatgaaatttgaaactaatttagttgataatacttcttgtaaaaaacttggaaaatttttatccttaaagaaacttttaatattttctttaatttcagaatttaaatctgaaccatctactactttattaagaactgatgtattagtaactaaataagcatataaaattgattttcaagcttgtgttgctgttttattcgctttaaaaaattcaatttctgaaagcttatctaattctgtagcttgctttgttcaattatttatggttttgtttctaactagctttttaattatttgttcattggttaatttaaagtcgatttgttgtttgtatgaattattatcttgtgttaaataattttcatttcaatatggaattaaactaaaaagttggcttttttggttttgttttaaagataacttaagaaaaatttcttgcgccatctttttataaccaaatgtagagggatggatatctaaatcattttttaatcactcttttttattagcttctcaaagttgtttatcataaacatttatgtaattaacttttgtttgagcagcaacttctttaattgtttcgtttaattttttaattatttgaatgatgtaatctttatctagatttaagctattttccaacatagaactaaataaagaagcaactgtagttaaattttcagaataaccgattaaatttatattagtcttaggattgatttttttaattaataatattaatttagctaagtttttacgaacttgttctaatttatcattttgtgattgtttaaattgattaattagttgttgttttaatagagtgtgtttttcgttattaatttgacttaaaagttcataatctaaagaaagaattaaatcattagctcctaaagacaaagtaatcaaattagaatcttttactttttgaattaatttaggataacttgtgctttcaaaatcattgaagacactttttattacatctgcgaaatgattattagtttgtttgtcaagttctaaagtaaatttgagaatttctttgttttgatttgcttcattttttctacttggttctaaaagataaagtcaatttctaatagtacttcctgaaagggctaagttatcaaaagaaactaaagcatcttttttaaccatttgaatgtagttagctaaatatgctggataagaaagccctcttacatgattatctttgaaatttcctcttatatcatttcctgattcaagattaaaaccagcagttattgaatcaccaattgctaaatagtttactttatctattaattggttctgatttttagaaacgctattgttaagattggtttttgtagcttcttttttagcaagtgtaggggctgaataaattgctatcgaggttattgtaactccagttgcagcagctaatgaaccagctaaaattttgagttttatcgctttccttaacattttttctcctttacttggaatactactttaaataaaaaacaaaaaaataaattactttattttttaaaatttattttcattgtattatctttctttgtttataaaaaagtatttaaagtgtcattaattcactaattattaatgtttaattattagttattgaattaactagtattgaaataagtaagaatattataacactttgtggattttttcttctttttctatatattgtagatgctccaaagagtaaaattaggtcatttttaagaacgtaaattgaaaaatccaaaaaattttttgcaattttattttttcgttatataatattcaagatttcatttagataaaaatgagattaaataaatatattttattttaatatataaatttaatattgataagaaattatcctttcacataataattaaaaaaactggtgcgctggtttttttttttttttttttactaaatgcaagataattttaaaataataaaggaacaatatgcatagattttttgtatttgaaaaaataaataattattttattttagataaaagagttttacaacatctaaaagtaataaaatcaagaaatgataaatttatttgtgtttatcaagaaaaattttatttaactaaatttgtttttccaaacaaagctgaaataattgaagaactcaatttaaatcatgaatttaaaaaacagccaatgcttgcaattgcaatattaaaaacaaaagcttttgaatttattttacaaaaagcggtcgaactaggagtagctaaaataattcctttttatagtaaaaacgttgaacaaaaacttggaaatgatatcgataaaaaagtacaaagatggcaagaaatggttcttcatgcagctcaacaatcttttagaaatattatcccaaaagttgaaaaacctattaaatttcacgaagttttaaatattgaaaaaaactttaaatttatagcacatgagaaagaaaatgaagaaaattcacaacttctatttgattctgattcattatttttaataggtcctgaaggtggttttacagaggatgaaattgcaaaagcaaaggctaaaaattttaaagtcatttctttaggaaaaagaattttaagatctgaaacagctgctatgttttgtttggcaagacttaaagaaaattcataaaatgctgtcaagtaaaaatgcttgacactttttttaaaaattaatgtataatttaaaaacatttataaaacttattaattaaaaaataaaattcaccagaaaggtacaaatggtaaaaatcagattaaaaagaatgggatcaaaatttaatcctgtatacaaaattgttatagctgacgcaagagctgcaagagatggaagatttattgaagcagttggtcactataatccaaaaactaaagaaacaaaattaaataaagaagtgattttaaattgattaaatttaggtgcagtacctacagaaacagtaaaaactttacttaaaaaagaagaaattttaactctttttactaagcaaaaatcacaagctaaagcaaaataaaaattgtgaaaattaattttttaactctatttccaaaatattttgaaccttttaaaaatgaatctattattgcaaaagcaattgaaaaaaaaataatcgaaataaatattgtggatatcagagattttagtaaaaataagcacttaaaagtagatgatcaaatttacggtggcggacctggtatgttgatgcaaattgagccaattgacttagcattacaaacagtttctggctttaaaatagcaatgtcacctcaaggtcaaaaattcacacaaaaacttgcttatcaactatctaaagaaaaagaaattacaataatttcagggcgatatgaaggttttgacgaaagaataattgatcatttagtagatttagaactttctattggagactatgtcttaacaggtggagaacttcctgcaatggtagtagctgatgcagttgctcgtttagttgaaggtgttataaatcaagaatcattagaaaatgaatcatttagtaatgatatgcttgattttccacaatacacaagacctagagactacaaaggtatgaaagttcctgaagttcttttttcaggaaatcacaaacaaataaaagcgtgaaaagaagaaaaaagacttgaaaaaacaagaaaaaatagacccgatttattaaaataggacaaggatgattatgaaaaataatttattacaaattgttgaaaattcacaaataaaaaaagaaactcctgtttataacgtaggagataatgttaaggtttatgtaaaaattaaagagggaaataaacaaagaattcagatttttgaaggtctagttatatctaaaaaaggatctggattaaaagaaagatttgttgttcgtaaagtttcttacggaattggtattgaaagaagttttcctttacattctcctttaattgaaaaattagaagttgttcgttcaaacaaagtaagaagagcaaaactctactttatgcgtgatagaaaaggaaaatcagcacgtttaaaagaaattaaaaaaacagcagaaaaataatatttggatttaatcaaaatgagtaaattagttattgttgagtccccaaataaaattaaaactatttccaaatatctaggagaaggttacaaagtagtagcttcagttggtcacgttgttaatttaaaaacttcaggaagttatggtttaggtattgatatgcaaaactgagaaccagtttatgaagttgaaagtgataaaaaggaaattgttaagagtttaaaagaagatgtgaaaaattctgatatggtgattatagcaaccgatgctgatcgtgaaggtgaagcaataggtcatactttagttgaaattttaaaaattgaaaataaatatcaaagaattaaatacaacgaaattaccgaagctgcaattttacaatctttaaaaaatcctttaaaaatcgatgcaaatttagtaaatgcacaaaaatcaagaagaatgattgatcgaattattggttttagattatctagtttattagctactaaaataaaaaatactccaataactccttcagcaggaagagtacaatcagtagctcttaaattagttattgatcgtgaaaaagaaatcaatgattttattccttatcactactttacaatttcagctttttacaacaaaaacacagaaatcaaatattacaatccagaaaatgaaaatcctgaatgagtagatgtaaaagacattgataaaatctataattctttaaaaggaaaattaaaagttgtagataaaacaatcagaagcaaaaaagatgctaaaataacaccacttaaacaatctgctttgtttaaaaaagcagcaaattatgcagctagttctgtttcttcttcattacaaagactttatgaaggttttggtgatcaagggcttatttcatatccaagaaccgattcaacaagattaagtcaaacatttatcgatttagctaaatcgtacattgaagagcaatttggaaaagaatacgtttctgattcagttaaaggatttagtggtgatcaagatgctcacgaagcaattagaccaacagattgttcactaacacctgaacttgcaaaagaaaaatacgacttaaaagaaatagattttaaactttatcaaattatttacaacacaactatgcaagcaattatgtctgttcctgaaagacaaattacacgttatgaatttttaaatcaagaacacaaattttatctttctggttcaataattacttttgatggttattttaaactaaccaaacctgatagcgaaaacacaaatttaccaaattgacaaatcaatgacgaaatagaaattgaaaaatacgaaaaacaagctcatcatacaaatccacctgctcgttacactgatggttcattaattgaaaaacttgatgaaatcaaagtaggaagaccttcaactttcgcttcatctgtgaagatattacaagatcgtttatacgttgaaaaacaaaataaatctcttgtgcctactaattatggacaaattactttagaaaagctcttacaaattagtccttctattatcaacaccaactacacagcacaagttgaagaagaactagatgaaattgctgaaggaaatttggattacaaaaaattaatgactaacttttgagataatttccaaaacgttgtgcaagaatctatgcaaaatgtagaaaaaactgaaattgaacttgaaaaagttggtgaaaattgtcctgaatgcaatcatgaactcatctatcgtaataacaaaaaaacaggtgctagatttataggatgttctaatttccctgactgtagatttattaaacaagatccaaattacaaaccaaaatttagacgcttttacaaaaaggctagctagtaaagttgaatatcaaattaaataaaggaagaaataattatgccagactcaagtgtgacattatatgttgttctagctttattacttgtttttatcgttgtcttcattctctttaattacttctcagatagaaagaaaaaaagaaggataatcaaagaaaaacaaagaattaaagatgaagaaaccaaatttattttaaaaaccagtgcaagagtaaattttatcattgaacaaaatgagaaattactctctgaatttaaagtgtctgttggtgattttaaaatgagtcaaattaataactttgctaaaaatgcacttgattatctttatattcaagagcaatttcaagatattttcattcgaaatccttttgaaaaagatgaaacttttttaactaattttcagcaactaatgaatttaaaatcaaatttatgaactaaaaatcataaagaattaattaattactttgttttattatctgatcaatatttaaacaatgataatacaaaagaagaatatatcaagcaaaatgaagtatttgcgcaaacttatcttgattttattgaacaagtaaaatacaaacaagaagaagttgataatctttttaatgttttcaaacaaaaagatgaactcgaaagattagaatacttaagagctcaagaacaactaaaaccaaaaaccttcattcacaaagcgaaagactcattttgtaagctaaaaaaagtttttaaatctaaaaataaaaaccaaacacaaggacaacaaaactagatgaaatctcacttttttaccttagcaaatattctaacaatttcgagattaattttagttgttcctttcattgttttactaacacttttttatttgctaaataattcaataatttctttaggctatcaaaatcaatttatttgaatgttttttttagcttttgttatatttattattgcttcaattactgattttttagacggtcatatcgcaagaaagaaaaatcaaattagtgtttttggaaaaatttttgatccaatagctgataaaatcataactacttcggcatttgtttatttaactattttaaatataattcctgtttgaattgtcgttttattcattgcaagagatatcatagtagatggttgtcgaaacttagcagcagctaaaaaattagaagtagctgcttcaatttggggtaaatgaaaaactgttgctcaaatgattacaatctctgttttatttttattagctccaatgctatttgatgcttcaataacaaattcgtttgataaaacaattctttattgacttattaatattccttcaataatagctttaattttatctttattttctggttatttatatctcaaaccaattgttgtttacctaaaacaatagtaaattaatgaatataaaaaaacatcttgaaaaagatgtttttttataataatttctttttttgattttagtgttagtgttataattttggcgttatttaacaaatggtggctcatatcggacttgaaccgataagcatttctgcggaaggttttgagtcttctgtgtctaccatttcaccaatgagccttaagttaaattctaccacaaaagattaaaattatgtttcagaattttagattggatgttaatatgaaaagcaaaaaatttttgaatcctttaatatacttaggaattgtttctgctggggctgcagcaggagtaggtatttattttgcaattaatgcttacaaagaccaagaatctaagaacactaatcaaagcgttaatttaaaatataaaaacgaaagcttaagcaacataatcaacatcagagcaagtcaagaaggaagtaaactctatccttctcaagttgctacagctccaaatatcagagaatatattaatttttgaccaactgaatttaatgtttttaattacgatgttgcaaatcttaataaaaatctcaaattaggttacaaagttattccaaattctgtcgatgatagaagagggatttttaaagttaatattagtttattacaagttgatccatacaataatcaaaatcaaaaagttcttgaacaaaaagtttttacagtttctggatttctaacaaaaggtgcaaatgtactctcaagaaatgacaatataaaatttaaagatagaacttctagtgtcttatccagcattaaagaattaaaactcaaacaaaacattaaaaaatttgatgtttctactttaaatgataaaaatttttgagattattttgaaataccagaaggttttaaaacaactgaaaaacttacactaatcccacaacaagttgaaattcaacaaaatattcaaactaacacagataacccaaataaaacagtaaatgttttacaacaaagtcaagaaaaacacaaatatgtaattttaaaagcaaatgaaaattattttctttctgttttagatattttaggttttaatgaacaaaataaaactatacaagtagaattaggacttactcatcaagcgtacaaagataatacagtagctaaatttttaacaatcaaaagtgatttattcgatttttctaaacaacaaactaataatcaactacaaaatccaaacatttcaattcaactaaaagcaaagtattctaactttttaccttcatttttctttgcaaatcgtcctttatcaactcaagatttaaaacgatattttgatataactaaccttgacaatttagataattatcaagtagaaatagcgaccgaattaaataatgatcaaaatggtacttttgctttatttataaagaaaaaagaagcacttttatcagttggagaccaagaaaatccaaatgaaaaacaaaataaaacaaacactgtaaatttagacgataaaacaactatttctacaaattcaacagcatcaacagctacagtaaatgagcaaaaccaagaaaatccaaataacgaaagattattttatgtttcaggatttaactcatatgacaaaattagtcaacacataatccaatattcaaactttagaattgatgacattaatgatttttttaatttagaagatgctagattaagaaaaaatgctcttgctaatttaaacaacgaagtagcttcagttagttgggattttattggtaaaccactaaaaagtttttttgaaggacaatcaaatactttaaacttattcgctaatacaagtaatctttatggtttttcaaaaagtaattactactttgcaagaacatatgattataaaattgaagacaataaactaaaatttgtttttgttaatgctttaaatgatcaatataacttatatattcaatttactcacaaaccaaaagctaatagcatttaccaagacacagatggtgatgctaaaacttcagatgagttattttcagatcttcacaaaagaacattggcaattcaatattttgttaaaaacacagaccataacaacaaaagcataataaaagctataagtggaacagcttgagtttttgatagagaattagacaaagatggaaaaccaaatggtgtttactatttagcaacaaatttgcatgttgttgaagaatacttaaaaaatccttcaaatgtctttagttttgcatattctctttccaacaaatcagatacacttcatttttcacaagaaaatgatttgatttttgatacccaacaatctgattttagacaaattagcaaaagaatttatgatgattatggaaatccattaagtcctgataaatacgaagtaagttctgaagaaagtaaagaattttgagataatttcaaagttattccacttggtcttaactcaacaaaagataacaaatttcaagatatagcacttattagaattaagtttcctaaagataaaattttaaaccgtggctttagcttggatgatattttccaagatgatgttttccaaatcaataaatttgaaaaaacaattcaaaacctgcctgatgctgtaaattactacaaccaacatcctttaaaattctttatttctaattcaataaaatgaccagaaaatcaagaaaataaagaaatttcactacctatccagctttatctaggaggatatttaagtggtgatagctgagttgaagcaagccagagtgctgttttagatactaaaaataatttccaaaaaacctttgaatatcaaggtaaaagatacaacgcaagtccttcaatttctttaccaaatatttacagtggacacggtatgagtggttcacttgtattaaatcaacaaggacaagctgttggaattttctgaggtggtattttccctgatgacaaaccaaaaactttaactcggggaattggacaaattgacacatttggtattaaaatcgattcaaaagaaaccattttatctaaatgattagatgaatctaaaaatattacaactgagttagacaaatatgagccacagatcaataaagttaaacaataattcacatccaacttgaaaatatgattacaaaatccatattgaagataaaaatgcacctaacattgtttttatccacggttttaactcatctcatagtggcttttgaagtacttttaaacagctaaaaaaagcaaattattattcctttactcttcctggaaataatttaacttttgcttataattatcaattaaatactttgtattatgcaaaattagtaattcgttttattaaaaaatttaatattaaaaaaccaattttaatcggacattccatgggtggcggaattgcattaatagttaataaattagctcctgatttaatacataaaataatttgtattgcaccaatgaactacacttcacaagcactaaaacaagagttttttgattttttctttcctaaaaatatttatcaatatcaaaaatttctttcttttcttgtttttgataaatcacaaatagaaagcgaaaactttttcaaaagattttcaactgtttttgattcacatttttacaataatgcttcaattattaaattagctaaatttttaacaaccaatcaaaatatgactttgttaaaagaagcaattcaaacaataaaagttcctattttattaattttaggtcaagaagatagaattgttctaaaacaagaaagtattgatcattttaaaaacaatatcaaacacgttcaaatagaaataatacctaaaacttctcatattatatttgaagaacaaccacaattagttgttccaattttaaataaatttatattttcttaatttgctaatttaaaaattaatttagtaaaattttactatgaaattttcaattctagatcaaggactaattgataaaaacacaagctctgaacaagcactttcaaataccattgaattggctaaaaatgctgaaaaattaggatacttttctttttgagtaagtgaacatcacaatgttcattctttttctatttcttgtcctgaaattgttatgatgcaattagcgcagcaaactaaaaatcttaaaatcggagttgcttcaattttacttaacttatattctgctttaagaacagctgaaacaataaatacaatgactaccttttttaaagatcgttttttgttctcattaggctcaaatccaggaactaaactaattcaacaagcttttaattattcatcacaaaatagtttatcctatcaacaaaaaatcaaagagctatttcattatttaaatcttaaaactaaaaaatccagcaaaaaagttcgtagcgttatacaaaatcaagcaaataaagagatttttatcacaacatttactttaaaaaatgctattctagcagccaaattaggagcaaatttaattattgcacataacttatttcctaattttttaaatactaaaaaaattatcaaaatctatcgaaaaacttttgaaaaatattgacctaataaacaatctcaagttatttttccttcatttattgttacatcaacaacaaaaacagaaattcaaaaattagctactcctttaaaatttttcttattaggtgaaaatgattttaacaaataccaaagttttcccacttgagaagatgtatcaacaagactgcataaagaagctgaattagatttaaaaagcaaaatttttccattaatcggaagtgctaaatacattcttgacgagttagaaaaaatagcaaatgatctagaaattgaccattttttattaattccaatggttaatcaaattgaaaatcgaattaaaatactagaattaattgccaatgaatttaaaaggagacaaaatgcaaaaatttgctaattatttactaattgaacaacaagataatatttacagcttacatctaactccagagctccaagatgatatcggaactgttggtttagtaaaatttacagaagaaaaatcagttaaaaaaaacgaaacaattgttgttatagaagcttctaaaactattttctcaattaatactcctttagctggaacaattgttgaaataaataaagaagccattaacaatcctaaatatttaaattcttcaaaacttgaacaaaattgacttataaaattaactaatgttgatcaaaaggaatttttaaaacttgaagactactaacatttgaaaaacattaaacaaacaatttaacaccaatgctgaaaaattattatcactaatcaatgaagcagaacatattttagtaggtattggttcaggattaacaagtgctgatggtattggttatagtggaaacagatttgaagataattttgctgattttattagcagatataagtttttagatatgcttcaagcttcactatttcattttgataattgacaaacttattgagcatttcatagtagatttattaaactaaattatttagaacaaccagctggaaaatcctttataaatttagctaaaatccttgaaaataaagacttttttatcattacaaccaactcagataattcaattgaagcagctggttttgataataaaaaagtgttttacatccaaggtaaatataatctattacaatgttcacaaatgtgtcacaataaaagatatcaaaatgatcaattgatattaaaaatggtacaaactcaaaacaatatgaaagtggatatgtctttgctaccacattgtcctcaatgtgatgcttttttagaagtcaataaacgaattgcttataaaggaatggttgaagatgaacaattttttgaagaacaaaaaaattatttatccttcataaataaagcaaaaaacaaaaaaactctgtttttagaaataggtgttggctatacaactccacaattaattaaacatcctttttgaaactacactaaagaaaacccttctagtttatatgttgttttaaataataaaaactacagaattgataaagctatattaaataaaactataatttttaatgatgatttggataaaattattgatgaagttaaaaataaaaaaggagctaatttatgtatttattagaagctattagagatggaaaaagaattacaagtggctcttatgcacttgctttacaagtgtgagcgatgactcatttagatgttcaagatgatattattgtttttccatatatttgcgatgctcatgtacaaattggattatttcaaaatcctgttgctgaagttaatttagattatgtaaaagaaaacaatatgttaatcgttagacgagatacaggtggaggagcaatttttattgaccaaaattctgcaaatttttgctttttaattcctaattcacatccttttagttcagttttgaacaattatcctaaattttatgaaccaattattaaaatacttaaaaaatttggacttaaagaggttcaagcaactggaaaaaatgatctaagtgttgatcaaaaaaagatttcaggagctgcaatgaaacaaacaccaaattatgtatacgctggttattcacttctttatgacattgattttgaaggaggaatgctcaaagctctaaatcccaacaagaaaaaaatagaatccaaaggaattaaaagcgttcgccaaagaataacaaaaatcaaagattacttgaatgaacaatacagaaatttaaatattttagattttaaagacttaattgttaaagaatttgaacaaaatccagtttttggaaaattaaaaaaactagaattaacaaatgaacaatgagcacaagttgatgaattagtcaaaaacaaatacgaaaattgggattgaacatttggacaaagtccagagtatgaattttacagagatcaaagatttgatataggaacatttgggatttcacttgaatttaaaaatgcaaaaattacaaaggcaaaaataacaggtgatttttttgccattaaaaacattaaattaattgaagaagttttaattggggcaaaacttgaaagagaagatttacttgctagattagaagctttaaacattgaaagtttttttgttaaaactattagtgctaaagacattgttgaactaataatgagctaaaatgaacattaaatccaaagagtataaaaaacttttttctgctatcaaaattaatcattgtgttctaaaaaacagattcgttctttctcctatgaccttaaatgcttcatctaaaaatggttttataagtgataaagacttaagatatgctcaaagaagagcaagctcagctccgcttgcaattacaggagctgcttatataaacaaagaaggccagctttttgaatttggatttggtgcatatagcaaaaaacatatcaaaggattgtccaaacttgctttaaaaatgaaacaaaatggagcaaaagctattttacaattagcacattctggacgtttttccattattagtttaaagagaaatggttatgttgttggagcaagtgaagaaaagctttcttttccttttgaacataaagtaaaagaactttctgttaatgatatcaaaaacataatcaaagattatcaaaaagctacttttattgctattaaagcaggttttgatggtgttgaaatttcatcagcacaaaaacttttagcgcaaacatttttttcaactttcaccaaccaaagaaaagatcaatatggtaatcaaaatttaaacaatagagctagaataacctttgaaattttagaagctgtaacaaaaactatcaaagaaaatgcttcaaaatccttcattttaggattccgagcaacagctgaagaaaccagaggaaatcaattaggttacacgatagaagagtttttatgattgattaaaaaaattataaaaaattacagtatttcttatttagctttagcaaattggggtagaaatatttacaaaaataaagtacgatctcgaaacaaatacttcaatttacttgttaatgaagtaatttacaaaacttttaaaaacaaaattcctataattgcaagtggtggaataaacacagtagaaaagtgtttagaagcaataaagtatgcagatttaattggtttatcctctgtttttgtagcagatcctgaatttgtagctaaatttgaaaacaatcaaatagataaaattaatctaaatgttgaactaaaagatataaaaaaacttgccataccaaaagctgcgtttaaagatatagtgcaaatgatggattacggacaaagtcttcctgaaaacaccagagacaactttcgtaaattagaaaaaaattacaaataatttttaaactaccctctttcctctaaatcaagtttgagttggcttagtttttttgatttgctttgtttttatagaaaaaatatcttgatttataactaaaaaattagcataataattagcagctattttacccattttcttttcttgtccaagatattgagctgaattaattgtgtacatttttaaagcttgatctaaagtaattctttgttttttgtgaaaatgtgaaagagcactgtaaatattttttcaaggatttaaatcacaaacttttcaatcagttcccaagctagcttttactttatttttatttaaatctctaagacgaagtaaaggaagttgagattcttttggatacatttgtaaaaagcaaggttgtaaagaaacatttattggatatttacttaataaatcaagtaattcatcatcaataattgttccatgaataattccatttctaaatttattttctttatctgctttaataattgctttagctacaatttttcctgcaatatgtgagctagcgtgaacaactgtagctaattttttttgattaatttcaacaattagttttgctaaagaattttcttctaaaaatgcaggagtgtcaaaatcttttaaatgaagtattttgcgatttaatcctccatcagcaaaaagtttaattgcttttaaattgtgattatttttcttgatttttaaagcagaataagaatttaaaaattgatttcgataatgctgatcagtcattcaaagctgatgataaatttctaaatttagcaaattttgattatttaattgttcataaattaaaaaatctcgatatcaattttcatttcttaaatcacaagtataaattcctgtaattcctaattgatttgcttttttcgctcatttcacaagtaattttttttctttttctatacttgcatttgaaattaaactatctgttttataaattattttttcttgtaaataaccagtgggtcaaccagcatcatctaattctataaaactatcttcataagtcgcattttgataaaaaatatttaatctttttaatgtgtttgtatttgcaagtccactatgatatgaacgtcttcacaaaaatattgatacatctggaaaatgtttatctaattcttctcttctaaacatagatttttctataaattgatcttcaaatcaatcatatccaattagtaaatcatctttttctattttgtttttttgaagatatttttttatcaaatctattgcttctttgtgacttttagcttttgataaatctaaatatctttcgtatttagcagcaaaataaaagtgaatatgggtatcgattagccctggtattactacttgattatttagatctattaagtgatcaaatttttcttttaaaatttcttcatttgtaccaatttttaaaaatttttctttttcaataacgaatgcttgagcaaaatgcttcttttttattcatacttttgcatttataaaagctgttttcatattttcctttgactttttttttttttttagtaaaattgtggatttttatttaaaatattaaataaacttacaaaatatacttcaaaaacatactttagtgctatgtttatcatttaatttaatactaaaaaaggaatttttaataaattatgaataaaaaacatataaaaacacttatttcaagtgtaagtattttaactcctgttgccattttagcttcttgtggacaaccaaccacaattaaatttgctacttctcaaggttcatattgaccaatgatgctaggaatgaaagaaattattaagatttataatgaacaacacaaaaacgatgctgatttcattcctgttgaacttttaacatcagatgtaactcataaaaatagtgaaggtcaacttttaagtagtttagatagtgatttatctactaagcaaagctctgattgaaatcttattttaggaaacaaagctactgcttatgttgcaaattcttatgataaattattagacgttggtacttctacagtaaatcccaattcattccctacaaaaataattaataattacaataaattattaggtgttgaaggacaaacaacattaaaaagtttaccttacaacatcaacgatacagatggtattgtttttaatttagacatcatgaaagttctttttgatatcataaaacaaggtggcggaactattgataaaaactcaataattgctaaaaaagtaaaagaagcagaaggaaaaggtaatcatattccatcaagttcaatgttttctgcaattaaaattaaagagtcttcaaaaaacactggattttctggatatacagtaaatgattctacttttagtgttattaaaaaagcttttgagtttgctcaaaaaatttatgataacacagaaattgatacgaccaaattatcaaaagatgtaaaagattcagagatttttgcaatagattatgcttcagatgtttttagaaaagaaattctttctaaaactaataaaactttttgaagtgaaaaaagtttacaaaataacaaaattacattagatgtaaatctcaatacaaatcaagctttaaaaacagaagttgaaaaccaatatcaagaatgagaaaacactttaaaacaaacacaatttataccaactacaacaactcaagcaaatactgaaactacttcatgaacaaaaaaagatattcaaactaaatcagcaactgatgatagtcaacaatccattaattctaaaacattttattctgttaaatttactgaatactttaaacctataaatcaatgaggatcttttgaaattagacaatatttaactgcatttacttatgctcctctagtaggaacaaactattctgtagattctccttgatcacgtgcattttttaaaaaagatttagaagaaggaaaacaaaaagcttcagaatgaacaacaagagaagatgtttatgctacaaatcaagcaatgaaagcagatgataatgcacaatatttagcatataacgctggtggttcttctttaattgctatcaaatccaacagtgatataataaataaaaatatcattaaatttgtagactttttatacaatggaacaggattaacagatttaactggtgctaaaatttcagctgctgattttatggctgaaaaatctgcatactttattccgacttcaacttcagtttcacaagctaaaattgatgaatttaaagcaagacaaacaacttacaaaaacaaattagcttcattagatactcaaattgcagctgaacaattagaagcaaaagctatacaagataaagtaaatgcacatacaaaagatgcatcaaaaccagatgcaacaaaagcagaaaaaacaaaattaacaaactacaacaacttattaacacaaagagcaagctttgatgttgcaattaataatttaacttcagtaattatttcaattgaatctgcattaaaatttgtaaacaacgataaaacaggaattcttccacaacctgcaaataacgatatgattcatatcactgaaaatcttaaaaatacattagctgatgcaactcaaaaagacaaacctactcaccttacaaaagaaaaattcctagaaactcttttaaaagatcttaaacaagcttaattttgtttaatgaaagcaaaaaataaaacatttttaaagtacttattttcgataagtactttatttttaggaatttctttatttatttcttgtacaacacaagaaaataaagctgatgatcaacaagataataaaatcgtttttgctacttctcaggctaaaatttgacctttgatgagaggtatgacttctttggttgagtactataataataattttaaaaatacttcaaactttttagaagttgaattaaaaacttcagaacaaactaaagcaaataatgaagataaaatggcaaatatactagattctgatttaaatgctaatcattcaaactataatttaattttagggaataaatctacagcttttattgctaattctcataataaattattagatttaaaagatgcaaatattaattcagatctatttcctcaaaaattagtacaaaattacaacaaaattttaggctcttctaacaccgaaacactaaaaagtttaccttttaatttaaatgatacagaagctatttttttcaacttagatattatggctgtcttatttgatttgttccaacaaggtggagggtcaattgatgaaaacacaaatatctacaaacaagttctccaagccaataacaaaggaaatcaacttccttcgcacagtttttttagagcattaaaagtaaaaaacaacaacgtatttcaaaatttagtagtaaatgatgatacttttagtttaattgataatgcatttgaattttcacaaaaaatctttgatggaattgaaatagataaaacaaaaatatttgaagacacaacagatgcaactattttttccattgattacacagaaaatgtattatacaaagacataatttctaaaacaggaaaagctttatgagaagaaaaactactaaaagataaaaatcaaaaagatatagtcaaagtaattaaaaatttgcaagatgatcaacaagtaaaacaagaactcttaaacacatatcaagcttgaactaatgcatttaaacaagtacaattagtaaaaaatgataacaaatgagactctcgagtaattgaatctagtaatcaaaacgctaattcacaaaacaataacgaacaaatcaactccaaaacattttactctgtggatttaaatatatcaggtgccattagagaatttaatgcagcttttgtatatatgccaggagtgggtatgaattattcggtcaattctccttgatccgaatattttgcatcacaaacaaataatcctgcttcttgagcaactagaaatgatgtttttgtacttccacaagcaactaaagcaaacaaaaacgcaccttttgaagcttataaagatggtggttcttctttaattgctattaaatcagataatgaagcaaaaaacaaagcagttgtaaaatttttagattttttatacaatggtcaaattacaaatcctttaactaattcaaaattaagtactaatcaatatttaatagaaaaaactggttattttttacctacaaaagaagtaattaagcaacaaactattgattctttaacaacaacaagaacaaattacttaaaagaatttacaaaattagaaaatgaactcaaaaatccttctttatcacaaaaagataaagaagaaattcaagctaaattagataactacgatgttgcaattaacaatttacaatcaggaattatttctattgaaagtgctttaaaattcatttcaaatcaaaaaataaaactagttcctcgtcctgcgcataaagatttaggaaaaatgggaaacactattattaatcaatttaaagaagcaactaaaaaagacaaaccattagtattaccaaaacaagaatttttaaacaaattacttgaagatataaaaagcattaactaatttaattgctaaatataacttttatttaaaaaactaggaactaattcctaattttttcttctttttgaagagtttctaataacattttggattgttttatagtattttttttgcagctaaataaaggttataagttatgtatttttatttttgttgttgttggtaaaaaatacttgcttaatttaattcaacaattgaattgtatctattaaaagttcttctatgaattggagaaataggttttcttcttataggttggtatgttgttttataagttggaaggtatcatgttgtattagatgaagagtgatgttttgctgcaggaattattataagcagaaggattggtaagacaattcatcaagatctgaagtgatacccttttcttaataaaattttaaataattaaattaattataatttgaaatgaatgtttccctaaatttaatgggaaacattcattttattttgtctttaattcgtttgtgattgtaataataaatataatttgtaattgctttgtgaaattgtttaaaagttaaaaattctttttcacgaccataaaaacattctctttttaatgtcccaaaaaacgattcaataacgctattatctaaacaatttccttttggagacatggactgaattattcctttttgttttaatttttctgaaaattgtctatgttgatgttgtcaaccttgatcactgtgaaaaattaaaccctcaagatttttgtgctttgaaaatgctttttgaagcatttttctaatttgctggttattagcgcttgtagacaactctcaagcaataacttcgccattaaacatatctaaaatgggtgataaatatgcttttccaaatggtcctctaaattcagttacatctgtagttcatttttgatttggttgagtagcaacaaaatttctatttaaaatattgtctgcgattttgccaacagttcctttgtaagatttgtattttcttctcggacaaattgctttgagattgaatttttccattaatctgcgaacttttttaaatccaattttatattctctattattaagttcagcctttattcttctttttccatatcttgctttattttcttcaaaaataagctttacttggcttataatttcttcatttttcttgtcaaaatcttcttttttgagttcataataaaaagtagatataggaatagaaaactcttttaatacttgagttaagcgaagatttttatcagcttttactctattataaattttttttattttttcttgccttggttgatttgagtcaaagatctttaccaaggcttttcacttttttagaacttcattttccttttttaaaagtttattttcttctctaagaagtttaagttcttcatatacagataatgaagaatttgattgatcttgactatcggaattgtttgatacttttgtagatttattattattattaatcttagatttcattattggtcttcctttgtttaattctaaaccactaattcccgattctaaatattttttcgctcaaaaagatatttgacttggtttaagattattttcaagtgaaattttaacaatttgttcaccagctaaaaatcttttaactatgtttaatctttgatctatagttcactttttatttcgtggttttttcttaagaccttcaactcctaatttgtcataaattttttctcaaaaatatacttgatttaaaaatttttttgacttgttttagcaaaatcaggctttttaatttcaattccttttttgtatttttttacacattctaatttaaattctaatgaatatttcataaaaaatccccttttctatttttctaagaaaaggggatctgctcacattttacatattttaattttaattattttatacaaacattgatatttaattttttatataacaaacatacaaattaaataaagttttttatcttattaactgtaaaaaaataatgaataatttttagaattaattaatttattttaaataaaaaacctgttgttttaccaggttttttacaatacttttattaatgagtaggtgggttaattacaatagtacctttagttttttcattaattattctttgaatttcttcaagaattttttccttttcaacttctattctttgctctagtacaggttttgctttttcataacctattattgcacctccagcaacaagtaaagctattgaaataataaacagtactaaactaacaaaaatcaagaccataaatacagtaaattgaattgctccgttatgttttatataaaatctaattgtaaaagataaaactactgctgcaataaccaaagcagcaattcctggtataaaaaaggcaagatttgatatatcagaaatatcaggtaatttaattttttgtagtgtatctgaaatcatattgttcctttcattaattttttaatattaaataacttaaaagctatagaatatagaataaatatacattgctttctataaactattaaaaattttaaattattattaaaaaaacaaaaatttttctactatcgaaatatttattaaagaaaatccttcaaaaatgaaggattttttactttttttgttcatcaaaaataatactaactaaattttcaattttgtcaagaattaaatcatcatttaattgaatttagtcatttaatattttcttctgtattaaattcttttgtaaatgtggttatttttttactatttaaactaataaatccagattcttttcctcaatttcatcaattagagatgtgagaatatcaaattcaaaaataaacaaaaataataataaaaagaacactaatacaaatagataagctaataaaataatgtttgaacttgaatttattaaactctaatttcttatgattttttaaaactataactttattagatttagctaatcatcaatagaaaatattaagtaaaattgaaaaaactataaagataattaaaataataggtgcagcttcgaaaaacacattgattgaattagcttgattttttcacaattctatattcatataataaatcccactttcttttattgatttatttataaaattagtttaaaaatttacaatacttaatttattttaaagcataatcacaaataaagataaattagtttaaaaaaacttattattaaaataataataataataaatttaaaatgctttttaaatagtttaaaaattataaattaaaattgtaataaatcatttatatttaaaaaaagaataaattaagaataaaaaagttttgaaattatttttgtaatttcaaaactctataagatatttaagactatattaataaaataatttataagttaattgtttaatttagcttcttttttagagtgtttgtattttaaagctgcttttaaaaaactatcaaataatggatgaggtctcaaaggtctggccaaaaattcaggatgatactgaactccaatgtagaaattatgttgtggatcttcgcaagcttcaattaattcactttgtggatgttttgctgagaaaacaaatctttcatcttctaaaataggaacaaattctttaacaacttcgtatctgtgtctatgtctttctgttgttttatctgttttgtaaattttagcaattaaggaatcttttttaaattcaacttcagaagctccaagacgaagagttccacctatttgtaatttatcaccatttttagtattaaaatctaaaacatatacttcatctttgtctgaagcaaattctttagaattagcattgattattcctttgtgtcttgcttgtgcaacagtcattgcttgcatacctaaacaaattccaaaagtcggaatattatgttcttttgtaaaagcagcagctcttactttattttcaaaaccacgttttccaaaacctggcaaaattacaactccatcagctgtttttaaattttctaaattaagttcttgtttttttgcacttgttgttgtatctaaaaatttaagatcaacttctagtttgttatacacagcacaaattcttaatgcttcaacaatggatttgtaagcatcaacaaactctgtgtattttccaagcatcatgattttaagagtttcttcttttttagcattataaagactttcaaattcttctcatttagttaaatcagcaggtctttgctctaatttaaaataatctaaaatcgattgaacaacttgtttttcttcaaaatataaaggaatttcgtaaacatttttaagatcaggaatggaaacaacattttgaattggtaaaagtgaagcttttgctactttcattgctgtttctttgtttaattctttatgagttcttaaaaaaatcatattagggcgaatacccattgcatgtaatttagaaactgaaaattgtgttggtttggttttaaaatcttgagaagtttctaaaaatggtacataagttaaatgaacataataagaattttcaaaatcagattcataacccatttgtgaaattgcatataaaaagagattagattcaatatcaccaacagttccacctatttcaactaaaacaaagtcagtgttatattttttttcaacattttttaagatattaattatttcatcgctaacatgtggaatatattgcaaagtttttccattataaaaaccttgtctttctttttcaaggattttagaaagaatttttcctgatgtgtagttagaatcttttgaaaaattttcatctgtgaatctttcataatgacccaaatcaagatcagtttctcctccatcttcagttacatacacttcaccatgttcataaggtgataaaactcctggatcaacatttaaatatggatcaagtttaataataaaaacagaataaccacgatattttaaaagatttcctaaagatgaaacaacaattccttttccaatacctgaaagtactccacctgttacaaaaataaatttagacattttttcctttatatttcttaaatgataatacagtttgttaatttataaatatttaaattaaataaataaaaaaataagagtatgagctcttattttttggattaaataactacacttctaatttaattttaatagaaggtcccattgaagcagatacagtaagatttttaatatatgtacctttaacaacgcttggttttaattttttaattaatgtaattaaagtttgagcattatcaactaatgcatttgtttgcattgaaacttttccgattaaagagtgaacaattccgtatttatcagctctataatttgctttaccttttttaagttctaaaactgctttatcaggtgttggagtaacagttccggtttttggatttggcattaaaccttttggtcctaattttttaccatattttcctaaaacaggcatcaattttggctcaactacaataacatcaaaatcaaattggtcaatttttaaagcgtgttctaattcttgagttgtataaactaaatcagcacctgcagcttttgctttttctgctaattcacttgaatctgtagcaactaatactctaattgattttcctgtaccatgtggtaaaacaacgctacctcttaattgttgatctgcttttctagtatcaagatttaatctaaaagctaaatcaactgaagcatcaaattttgtataagaagtttttttcactaattccatagcttcttctaaagtatagaatttgtttttatcgactaatttatttacttcagcaagtttttttcctatttttttcattatttagcctctttctgttgttttacaaattcatctcatccttcaacttctacgcccatttgttttgcagttccataaattgtaaacattgctttttcaagatttttggtatttaaatcaactaatttatactgtgcaatttctcttaattgttctaatgttaattttgctactttagtagttttagagtttgaagaacctgattcaatcttagctaattgcttaattttgtatgaagcaggtgaagtaaataatttaaaatcaaagcttttgtctttgtaaattgtaatagcaacaggaactggttcacttcctctatctcttgttgcatcattgaattgtcttgtaaattctggcataacaattccaagtccagctaaagcaggacctggtttggcttgaccagcgttaaattgaagtttagcaactcttactacttctttttttgccattttcgagcatcctttcataagttctcttggtggtactatcgaaatttttcttccactagaggcaataaatgcttttaaataataccatatttgctaaaaaagttattaaaaaaataaattttataaataatcaatttcactatcactctgttttaaaataggcttgtttgttgtataattttaagtaatttatttaaataaacaatattattttggagcatatacatgaatataaaacaactattaaaatccgctgcgaaacacgatcaacaaaacattagtattaaaggctgacttacaaattcaagaggaaatgccaaaattaaatttttagaaattaatgatggttcaacttttgaaaatctgcaattagttttaaaaaatgataaagcaaccattgaacaaattgaaactttaaatctaggtgctgctattgaagtaaaaggtgtttttgcatatacaccacaagctcagcaaaaaggtgaacttctttgttctcaacttactattttggcacattcaaatgcagaatttcctatacaaaatcaagaaatgtcttctgaatttttaagaagcattccacatattagacatagaacaaagctttttagagctgtgatgagaattagatcaactttggcatttgaaattcatgaatattttagaaaacatgactttttatacctttcttcacctattattacttcaaatgatggagaaggagctggagaagcttttgttgttgataatgaagaaaaagatttttttaacaaaaaagcaactttaggggtaactgggcaactacatgctgaagcttatgctttaggttttcaaaaggtttatacatttgcgcctacatttcgagctgaaagatctaataccaaaaaacatgctgctgaattttgaatgattgaacctgaagtttctttttataaactaaaagacattattcatttaggtgattcgcttttaaaaactgttattaaaaatacaattaaaaaacatcctgctgagtttgaatacttccaaaaaaatattgatgcaaatttagttgaaaaattacaacaattttacaacaacaaattaacaattttagaatatagacaagctattgaaattctaaagaaaaataaagcaaaatttgaatttcaagacattgaatttggcactgatttaaaaacagagcacgaaagatttctagctgaagaagtagtaaaaggacctgttgcaattgttaactatccaaaagaaattaaagcattttatatgcaccaaaatgatgatggacaaacagtagcggcttttgacttactagttcctggaattggtgaattaatcggtggatcacaaagagaagtaagatatgacaaattatttcaaagactaaaagatttaaatatggaacaagaagatttacaatgatatttagatcttagaaaatttggaaattatagctctgctggttttggtttaggttttgaacgtttaattatgtatgtaactggtgttgataatattagagattcaattccatatccaagaaccaataaaaacttaatgatgtaatttatgatgttatcaatttttttacctatttataataaaaatcaaaatttagaacaaatattagaaaaatttgtaaaacaaactaacaaagattttgaacttgttcttagcttaaactcaccttcagaacaacaactaattgctttagataaatttaaaaaatccttcaaaaatcaagtaattattttaatcaatgacaaaaacaaaattctatctgaacaaattttagatatggttttgctctcatctggtgaatattttgtttacattgctgattttttagattttgaaaacaatttggttgaattattttcaaaatacaaacaaaaatttaattgtgatgttattgaattcaaacctaaattaaaaacttattttcaatgaatgcccaaaaacagaatcaagaaaaatcgagtttttaacttaccaagtcagccacaagtgatagcttattcatttcctttattttttaataaattttttaaaaaagatacttttttaaacataattaaaaacacaaatattaaagaaaataattcaaaatttttactaaatttagtttataaaatcttattaaatatacaaacttatgtgtttatagatcaagtttttttaactattaaaaatattaaagtagataaaattagtttttatactttaaatagaaactgaagtgaaattcaagaatatatgcttcaaaatagaagaaaatttgcaaatgagatccaatatgcaaaaatgtatttctttgaattatttattccaagtatgtttggccttcataaaagtaatttttttaaaaaaatcaaacatatgctttgaaaagaatcacaaatacaattattaatggataaatattttagttttttagaaaaattgcgcaaagtggaatttaacaaaagcattaatctttacttatttgaaaataacgaagaatcttttttaattaaatcagacttaaaccaagataaatgaaaagaaattcataaaaaattataatgcaaacacaaaataaactagctaacttttggattagatttttgagcggaattatagatttagtaatcatatttgcttttataattttaatatcttatgcagtttttgtaaatgatgatgtaacaaaaaacattattatctgaaaatactatctttgatattttttaataattgttactatttttttactcaaaataatcttgcctttgtttaacaaaaaccaaacgattggtcaaaaattttgcaaaatcaaaattgtttttcttgaaccagctaacacatttaaacaaagattaattcagcaaatcaaaaaagaaactctgacaacacttatttgaattatattatttataatctctgcttgctgtttgatcccttcaatcgctttgaaattagttcaatcaaacacttctaaaaacccaattaaaataacagattctaattattgaatttgatgagaacaatttttaatttctatacctattttattttcaaatattaatactctattaagttttgttttaattatctcaattgcaagaagaaaaaaagttggtataaatgatttattctccaaatcaagaactgtttgagtctataaaaaagaagacaaaaaccaagatttaatttacagaattgaaccagagctaattagctttaaaaaaattatatgaatggaaagtgaacaaaatgaacttagataaaaattctcaactgcaaaatgatattcttagtggactaaacactaatcaaaaagcagcagtgcttgaaaatgaacatcatttgagaattattgccggagctggaaccggaaaaaccagtgttttaactaaaaaaattgcttatttaattgctgccaaaataaccacggcaaaaaaaattttagctcttacttttactaataaagctgcaaatgagatgaaagaaagggttaaaaacgtaattggtgctgatgctaatgaaactaaaatttttactttccactcactatgtaatttaattttaaaaattgaatcacaacaatttaaaaaaataaaagaatttgaaaatctagataaaaactttaacatcattgatgaaagagatcagaaaaaaattttaaaagatgtatacgaaaagcttcaattttctttatcaaatgaagaaatccctaattttagaaaagcaattgattttataagttatgtaaaaaataaggaactaacttttgagcaaattcaagccaacgctcaaaattctacagagaaaaaacttgttaaaatttacaaaaactatgtttactacatgaacaaagcaaacgtagttgattttgatgatttgcaaatctttgttaaagtcttatttactcaaattccagaaatagccaaaaaatgatcttctttttttgactttgttttagttgatgaatttcaagatacctcttcaatacaatatgaaatagttaaactattaatttcaaaaaaaaccaaattaatagttgttggtgatccagatcaaaccatttattcatgaagaggagcagatgttaatttaattttaaatcttgaaaaagactttgataatttaatttcaataacattaaatagaaactacagatctagtcaaacaattctagatgcagcaaatattcttatttccaataacaaaaacagaatcaaaaagaatctagtttcaaatcaagacaaacaagaattagaaattaaattttttgacgctgctaatcaaaatgttgagttttcttgggttattagcgaaattaataatctaagaaaaaataaagttcaacttaaaaacattgctattttatatagacaacacttttatgccaaacacttagaagatgaactttttaaagaaaatattgcttataaaattgttggaaatacttcatttaattctaaaaaagaaatcagagatgcaattaattttttaagagtaatcaatgatggaaacgttgttgcttttagtcaagtaattaatattccttcaaaaaaaattggtccaacagttttgaataaattaacttatttagctgaaaaatataacaaaaatctttatgattttctaattgatttttatagtaaaaaaattaaatttgtcaatgataaagaggataaaattccactttcaaaagaaaatcaaaaaaaacttactcatctactttcatacatcaaggcatatcgcaaactatttgaacaagggcataaaaaatttgatgaacttttaaaagcatttttacaacaaattgattatcttagctcatttaaacatgaaaccggcgaaagaaaagaagctcaagaaactttagaaaaattctacgcttctttgcgtgtgtgacaaaaacataaaccaaataaaaaactaagagattatttagatgatagtgttttatcttcagatttagataacgattatgaagcaaatacttcaatttcactaatgacaattcacgctgctaaaggacttgaatttcaaaatgtttttttaataggtatgtctgaaggagtttttcctactaaaaagactttagaaagctacgatcaagaacttttagaagaagaaagaagactagcttttgttgcaattactagagctaaagaaagactttttatctcttattcaagatctaattttctttcagcaagtaaaacaaacaattatcgaccaacaccaattagttgctttgtttctgaaatgaagataaaatctgaacaaattttaagttttagtagaattaccctaaaaggtgatttaaactatacaaaaagcgaaaatactgatttttatcaaggagatttagttcatcacatcaaatttgggcaaggaattgttttaaatgttgaaagtgaaacaattgatgttgaattttttaatttagaagaaacacaaaaaataaaaactatcttaaaaaatcataaatccattgaaaaaataactaaatcataggctaaattatgagtatagaatgaatatatttaatcttttttgtttttattttaattatcatagttttattactattgtctttatatttcttcaaaaaaatacaaatgaattgtttttttatgattccttttgtttatgatggaagaaaagcaagaattaaaatcaaagatggttactttttagaatatgctaaatttatttcaaaaagtaatccattagtttttggtgactgagtcttgtttagtgattttatcgctttgtttggaaacaaaaatttacaaatattaaaagatgcattttcaaaatgaaataattataaaaacaattttgtaatcgaattttccaaccaacacgataataaaaaacagcttcaaaactttaaattacactttgaagatactaaaaatgaaaaaaataaagaaaaaacatttattttaacttctataattcaaaaaccaatttttgattacttttttattcaaaaatttaaacaaaaaaaacataaaaaaatgattaaaaatgattttgtttttaattcaaatactaaaaaaaatattgtttttctaaacttcaaactcaaaaaatcattagcaaattttgaagaaaaagaagctttatttgagcaattttactgatttaatatgttttctttaagaggtttaaaatatgttatttttaaaaaagatgttttaactttacaatttgaattttctaagaaaaaatcagttgaaaattacgtagaaaaattattttctatatttttaaaaaataaatacatgtttttctacaaatatatttcagcttttgttagcaaaaatcgtgaagatttaaagtatttaaatataaaaattgaatacacttttaaagaaattgaaaaacaaacaaaaactactttatttttagatctaaaaggatttaataattcaaatttagcaaatgattttaatttattagaatcaaaaaaagaagataaaataattacaaattttgacaaaataaaaatcaccagtttaaatacttttaaaaatctcgatcacaaaacaactgatcaaaaaatttacagtttttcatatttagattcacaactcactaaattcgaaaaagaacaactcacatataattcctatctagaacaatttcatcacgaaggcgaaccttacatacttttacttgaacaggaaatgttcattttccttcttaaaaaagaaaaaattaactacaaattaaaatatttaattaacgtagataactttaatagcattaaaaatattatttttcagcaaaagcaaaaagatcctgaatttgtacaaaatataaacattggttttgtattaaatgaaataaactcaattgattttttaaatattgcaatcttaaatcctacatttatcttcttaaataaagagaaatttcaaaaattagataatccaaaaatcaatattttagttcaatccctatttagctttttaaaaaagaaaagaattaatttatattgcggacttccgaacaaagaatttgaaaaatattatgaaaaattaggtgttaattacttttattagtttataataattaaacaaaatataaggagaattacaattactttattaataattgtgacaatgttatgaaaaaactagcatttattatagattcattttctggtgtttcacaagaaacaatagatcagactgacgatgtggaactacttcctttaaaatttattttagatggtgaagaattcttagatgatcaaaaaagttataaaggcgaagagctatttttaaaaatcaaacaagcaaaagaatttaaaacatcaatgccttcaataggattaatggaatctgttatcaataaacttgaaaaagagtatgaaaacattattgttcttcttattccttcatttttatcttcaacatactctacttttaactcattaattaaagataatcctaaatttcatctcatcgataatcacttttgtggtgatgaatatttagatattgctaaatttgctttaactgaactcaaagattattccaccgagtttattattaactttattaaagatatcaacaaaaactcattaaactttgttattccttcagatttagatcactttacaaaaggtggtcgtctagtatctattaaaaaaatgattataagtacaataaatagcttttcaataattttaaaaattactgataaggacattgcatttgctggaattaaaagaactctaaaaggggctgttaaaaaagtagcttcaaaattaaaagaattcgcagagaaaaaccatcttcacaactatatttttaaattaatttattctggaaatgctagtttacttgatgaagtagtttctgttttaaaacaagaagaaattgaagtaaaaaatgttcaatttgcatctgcaattgttgctactcatacaggttacgctgccttttctattggaatttttcctaacttagataaatgattaactaaagcttaaaaattgactttatcaacaaaaaacacatctattggatgtgtttttttattaataaaatactttttattctttatttcctatttttttcctttttttagcttaattgtaaaaaattttttaataattagtaagaacacaaaaaaacaaacaaaaaaaacaaaaaaaggagacttaatatggaaatttataaatttggaaaaatagtatccaaaagtaaaaattatttaattttagaacaaaattatgtaggtcatttaatttatgtgcctaacatagatagatttgaaaaagatgaaagtaaaaaaatatatatttataaatatgaaaatgaatattcaaaaacaacatatggttttgaaaactttagagaacgtattttatttgaagatttaatttcagttcaaggtatcggacctaaaactgcaattgctatactaaatcaaggttgagaaactgcaatgtcatatatagctgatggagactggaaaagaattagtgaatttccatatttaaatgtcaaaaatgcaaagcaaattgtcttcgaatttcagaataaatatatcaaaatcttccaaaactatcaaaaaactttaaacaaagacaaagtaattaacgttgaagaagaagttacctttagctcaaaaactgttttagaagataaaatagcaaaagaacttgaagatacactaaaaatccttggatttcaaaagaaacagattaattatgcgctttctaaagttcaagctaacaatgactttgaacttttagtggaagaagcaattaagttgatttcaaatgcaagagaatttagaaattagaccaaagaattttgaacaattcattggacaacaaaaactagttgagaccttaaaagtattgatttcttcttctaaaaagaggaaaaaacctttagatcacatacttttttatggctcacctgggactggaaaaactactttagcaaacattttagctactgaaactcaatcaaaaattaaatatattcaaggtcctttattagaaaagaaatctgatattttatctatgctagccaatgttgaaaaaggtcatattatttttattgatgaaatccattctattaataaaaatatagaagaactactttattctgctatggaggaatttgtcatagacattcaaattggtgttgaaggtgagagtaaaattatgcgaatgaaattacctgagtttacattagttggtgcttctactaagatttcttccatttctttgccactaaaaaatagatttggtcttacagctaaaatttatgaatacacaagtgaagaaatgaaaaaaattattcaaaattcttctaacattttaaatattgaaatctcagaggaattagttcattatgttgttgattttacaaataaaacaccaagaattgccaataacttactaaaaagaattcgtgattttgcaatagttgaagatacaaaaacgatttcaaaagatataattgataaaacttttaatggaattggaatttttttaaatggtttaaatctacaaaatattgaatatttaaatttattagctaacgtctttaaaagaaaaactgtttctttagatgtaatttgtggcataatgaaggaaactaaagaaaatattgttaataatatcgaacctattttattacaacttgaactaattgaaaaaacaccaagaggtagaaaaattactcaaaaaggactagactatcttattagtataaaaaaataaagcaatcaaaattgctttattttttcttcttttttatagcttttttgcaataaattaagcttctaatttgaaatttgaaatttgagagtaaacttttttatcatttttaaatagttcaaattcatttggagaagaagttcataaattaagtggaagtttaaaagaattaattaattttgcttcttttaaatacatttttgttcaagggtgaagatatttacagattttcacaattctttctttttcaactttagttaattgagttttagtccaaaataaaaagcctaaattgtaatttggatttaaatcataaattttttgtaaagattcaaagttaaatgaagaaaaaataattttttcaactaattttgaatcatattttgaaactaatttatgaattaaaccttctattcctttgtattcttttgatctgttttaatttcaatgttaataactgaaaatttttctaagtaaaggtctaaaaattcttctaaagaaagaattttttgtactctagttttaactttgaaaaaagctgcaacatcttcttgttctaattcatgaaaagtactatcagatatttctttgcttcttaatgatgttctttttgtattttcatcatgaattaccaccaaacgtttgtctttagataagtgaacgtctaattcaactccgtcaaagcaaaattcataagctaaatcaaaagctaattttgtattttcaggcgcaatagctgaaaatcctctatgtgctaaaagtaattgtgttgatttaggcattgtgtaactcccttcatctgtagtttgtttttcctgattttttcatttcgattgtattagctataaataccactaaagcacataatactccaagtagagttatacctaatgtaattgctaaaataatttgatatccggttacattagtatttgaatgccctggattagtatatgctttaccaactgctccggtaatttcatacaatcaagcatctgttgaaaatcctataaatgaaagaattccaactgatgatgcataattattttttcctatttcaatttcaccaacttgtgaatatcttagtgttaccattgctcaagataaaacaccaactaataaaaataaaattgatgataaaacaataacaactgttgaataatttgaacttataaaagcaagtaaaatgataattaaaacaagtaaaagaccaattacagaagcaaaaattagaaataaaatatagcttttaaatttgtcagctaaatatccaatgtatgaactaactgcaaatcttagtgcataagttctaactccacctaaaattgttactagaactacaggggctaagaaagcgttttgaagcatttgtattaaataataagcaaaaactgattggaaagtatacattcccattacaaaaattgacaacattcagagttttcaattttttaatgaagttcaaacttgtaaaaggctagctttaaatttttctcagctaattttagtaatttgagatttatcaagtggtttttcttttactaaaaatagaaccaaaaatgaagtaattactaaaaatgttgctattaaaaacgcataaacagaaaacggaactgttgaattggttgtggatttatcattgtatcaaactgtagtaataataagtccaattacaaagacaaaaataaaaccaattatcccattcgctgttccttgaattccatatgctaatccttgattttcctttgtagtttgctgagaaacaagttttcataaaggagttcagaagattaatgttgaactaattcctcataatccaaagactactgaatattgtgccattgctgattgatatccaatgtctttgtgtttgagaattattgctccaaatcagaacgttaaaattcctgtggatagaacagctaaaaataaaagtttacgcgagctaaatctattagctaaaaaacctccaggaagttgtgtagctaaagtaacccaaccaataattgctgttaatctagctacatcatcttcatgtattcctaaataaatatgtaaattaggaacgatatttttaatataataaggcgcagcaataacaaaaacatctgctgcagccaatattattaaagctactatttgctgtcaagtaaatgctttaaatttttctaaaattttgattttcatatttgctacttaaaaaaattaattgtgtactatatataaatatatatacatcttaattttactttaatttgtactaatttttttctattttttaacaactaattaatttttagtactaattttataaaatgtcaaaccatcaacattgctaaaacgtcattttgacaatatttttgcaaattatgttttacttcttttcaagccacatcaccaattttttttaaatatctaaaagttccttgattcatagcttgcattccgttttgtacttctaattctttgtaaggaataattctttctttggttttataatcatattgagtaataaatttttcaattttcttaattgaataataacctttaagatcagaaacttttattcatttaaatctaaaaggatcttgtaaatcaataatgttatcagtgatatgttttgcaaattctttacattgataataattagctcgagcatcacctaaatcatgatatttttttaaaattactaacatctcatttaatctagttatttcatatgctttgttaaaaacaacataataatctgctttatctgaataaattctttttattatatctacaaaattagttcaatgataagttaaaggatcataaactaaattaacttcatcaaaactttgttgaattttttcttcattaatagtagaaataattgaaacttgaaaaacaatttgctgataaggcaaagtataatcaatgcttggaaaaggcaaggaaatagattcaaaatcaaatcatattatccttgcatctttttgtaaaaacttttgaatatacgaatgtaatgcttcttgtttttctgtattaatttctattttgtttttttcattgaagaatttataatcatcactttgttttatttcgtgcaaaaattcttcattttctatacattttatgatttttttagctgaaagaaaaagtccactaaaacctgataaatcgctatttaattctttgacaatatcaacaaaaaatggacttttttgaaacaaaccatcatctaattcactaactggtttaattgatattacctgttttgctttgataatttcatcaattgcatcattgatttctaaaaaatagcccgctgaaacaattgttttttgtttttttcctttaattgttggaatcatattgtcttttacaaaattagataattttaatcaagttggattttgttcaaattcttcagtactcattccttgttgtttgctaatttttttagcttcaaaatcttctttgtttgttgttgtttttgctgatttattaacatttatatttacaacctctttaaaaagtacttcatttttcttcatttcttgattaatatcgagcaaaaaaatactaatgtcttctaatttaaaaacatcatataaagcactttttactattcaaaattgtcaatgagcttttaataaatcaactctttttgtagaagtactaagtttgagtgaagaaatttttttctctttgataaaaagaatatctggtcttgcaatgcaatttctatattcaaaaactggaaataaaataatatcatattcatctgattgcaaaattctttgtgtttcttgtattttatcaattgttgatttggatttgattgtgtagatttttttatccttgtactctttttcgatatattgttgaaaaaatcaaggatactgactaaaaacatttatattaatcttaaaaaaatcaagtttttctaactctggatcatctaaatcttcaagtgaactaaaatttcaaattcctttttcattttcttcactttcttcatcatattcttgaatttctagtgtattagaatctaatttatgtcaaataaaatatggttggctggtataaaaattataataatgtctatatgttataaactcttcttttttcatattattattttacataaaataaaaaataaaaaagaagtaaaataaaatttacttctttttattataaaatttctgctttgtctttgaaattctcttttggtgataatgtaagttttgcttttagaactagttttttaacttcttttgcaatagcaggagctgaagaaattgctggcgattgcatacctgcaacattaataaagcaagggtttttatcagctgctttaattataaaatctgaagttgcaacatctattgaacgtgaagctgcataagtagtaataatatttgaaaaatttaaatcagggaagattttatgacctatttcttgaatgtttttagctagttttaaatccacagatttagcttcatctctttgattgtgttcttcagcagttggtccaaccataatattaccattaagttttgtagttacaattactcctttaccatatttagttggagtcataaagaaaatagatttagcatcaacgttgtttaaaggcgaaagaattaaatattgacctcttaaaaatctttgttcaaattctggataacccgctaattttgaaatttcatctgcaaaagttccagctgcattaataacaacttttgttttaaattcaaaatctggattgtttgtttgaataaaaaagacattatttttaaattctatattttcaacttttgtattttcaaataagtgcgcatcgttgtttttagcaatttgtaaaaaggctaaggatgctttttttgaatcaattattcaagaatttgtacaaactagtgaagaaacaactaaaggatttaaattatgataaagttttttagttgctttttcatctagaattttaagtgattttggatttaaattattttgaattcctttgttgtataaatgtaataattctgctctttcttcatcatcaaatgctataacaacagaatcagattgttttcttggaaatttaacttttggaaagattttttcttgtcataatttgtttccaataacatttaattttgcttttaaagtgttaggttctgcatcaaaaccacaatggataattcctgaattagttgctgtagtttcatttgcaaatgaaggatttttttccaaaacagctaacttaattttatatttagaaagttcataagcaattgcacttccaactattcctgaacctattattactacatcaaatgataaagttttcattattatttattctccaaactatctgaatttacttctaaaattgcatctgaaatggtaacagcttggttattatttgcagcttttataactttaaataattttcctcttggtaattgtgctttaaaaatatagtcaaatttacttgtttcatcttgtccagctgcattttttgtaactacaggactttcagctctagctacataaattttttgatcttctggagttggattttgactttcatcttttgctgtgaaaacttgaaggaaaatttcataattagttttagaaaaatcttgtatttcttttgcaaaacttactttaaattcaaaatcagaagtttgtccatctgcgttaatgtttcctaaactaaataattgcacattttcaatttctggtttagtagaaaaactaaaaggaagtaggtttttttcaaatgttaaatccatttgatttttactttcgcttgagtttgcagttgcattagcagattgggaagcattatttgtcaaagcagaattttcttttgaaatttttgtaattatgtattcagattttggttttaaattttgtaattcaaagcgtaaatatggcattctagaaacattttgagtctcttgtgctgttgtgatattgttattatttgcttggtttaaatttgcttggctggtttggttttgtgtttgatttgcagttgtttgttgtgtattttgtttttcttgaaaactaatttttgtttgagcaataagttcaggagaagaacttaaaggaagaccgttatcagaaatttgtttgtatgtaagtgaaaataaagtgttgttttcgttcttaaattcttctggatttaaatcaactcataaaaacttgatggttgtattgtcagaagctaaactattaccgtttatactactactgtttatactacttagttcaggtgctggtttagttgtaaaagtttgtaattctgcaggtaataacacaatgtcatcaccttttaaaactctaaaagcatattttgtatttttttcaagtccagagatagtcaaagataaactagaagttttatttgaagtagccaagctaattggatttatcaaacttattgttggagttactgttttaaagtcttgatccttttcttttttgagctgaaatttataaagagcttgaatatcttcctttgttggagttttatctttgttttcaagcttaatattgtcaaagttgattgttaaagaattggaatccaaattcacaaaacttatttttgaaacttcttcttccgaacaagaaacaaaagaaacaatcggcacactagtacttaaacttccaagtaaaattgaaattgaacgttttttcataataatcctttgagactttgaaattatagttttgactttaaaaaatttaaatatttattagtattaaattatactaactttttttctcttttccataaataaaaactgcaaattttcaaatttgatcaactataaaaattaaaaaacctaaaaaaaaggaaaacacaattgcttttgttgttacattatctgagttatttaacaaatcaaaataaaaattaatatgaaatacttcgttaactcctggtgtaaaacaaataaaaattatggataaaacacttaataaaaaaccagatattaaatatttagttttgcttcatttttcaagcattaatggttttggaataactagaataaaactattaattgcaagtgaaatcgaaatagtaataaatgctaccgaagaagcaaatacacttttatcttcaaaagttaaacctgcatttgcaactaaattttgtgctcaaaaataacttaacaaagtgattattgtattaaaaaatgaaagaattaaagtttttaaaataatttctttattaaacaatgatctattattttctaaaaatgttttattcattactgattttgaaatatttgataatccaatcgcaataccacctaatgtttcagaaacaacattaattcaaagaatttgtaaagctgaaaaaacattatttttaaaaataaataaaccaaaaaaagatattaacaatgcacataaattcgcaattaagagataaataaacaaaattttgatgttattaataacatttcttccatttttaattgctttataagtagttgcaaaattatcatcagctaaaattacatttgaaacttgttttgtcacatcagttcctgtaattcccatagcaaatccaacattggattttttaagtgcaggagcatcatttactccatctccaagcattgcaacaatgtgttttttatcttgtaaagcagatacgattttgattttatcttctggagtagttcttgaataaactaaataattttcaacatttttgcttcatttttcttcatttaattgatctcattgagttttagaaagactttgttgttctgaatcaattaaactaatttgttgagcaatagcacttgctgttgttggatgatcacctgtgatcataactgttttaatattagcatttttgagtttttcaattacttctttgattccttttcttggattgtcttgcataataattaaaccagcaaaagttaaattattttcttcatgttcaaagtgtttttgttcaatttcagttgaaatttctttataagcaagtgcaaaaattcgataaccttttttattaaagttttcatatacttctaaaatttgtgaagtaacattaactgatttttttagaataatttcaggcgcaccttttgctattaatatatttttttgttcaattttattaataactgacatcatttttctttgtgaattaaaaggtatttcaaaaattcttggattactttttaaaaagttatttttattaatatttaacttttgagattcttctaaaatcaaaagttcttcaggatctccaattgatttattttctaaattatttaaatcataaacagcatctgtacataaacttgcatatgttcaaaattgttgctgacttaattgataaataaaagtatctattaatttcattttattttcagtcaatgttcctgttttatcagtacaaattactgaaatattacctaaagtttcaattgaagaaatatcctttaccaatgctttttctttcgctaattttttaactccaataattaaactaatagttactaaaggaactaaaccttctggaattactccaatagctatagtaagagaaataattaaagctttttgtcaagcatcaaaattaccttgctcttttataaaaataaataaaaagaaaaaaaataagctaacaatagctgcaaaaaatccgataaattttgaaaatttaagaattttttgttgtaaaggtgataatgcttcggttgtatttgatattaatgaagcaatttttcctaattttgtatcagatccaattgcacttactaaaagctttgtttttcctgaactaatagttgaaccagaaaacaaaaagtattgatcttgttcaaattcgtttttatctttaaaagaaaaattctttttataaactgattctgactcacctgttaatatagcttcttgtacttttaattttgattgttcaattacaacaccatcagctggcacaacatttccaagttctaaaagcaaaatatcaccagctactatttgacttgtatcaattacaacttcttggccatctcgaagagttttaacaactgatgaattcattttttttaacgaagaaatggcttttttagtttttatttcttgcattaatttgaaaaaaacatttaaaaaaataataagcaagataactaaaggttcagcaaaagcaacaacttgttctttaggttctaataaattatgaacataagaataaagagtaattgaaaaagaaataataacaacaattaacaaaattaaaactaaaggatcttttagttgatcaataatatttcagaataaggattttggctttttttctggaattatattttgtccatattttgcttgatgttcaagtacttgttgttttgtaagtcctttgttaatatcaatttcttttagcttgtcaaactcaagatgttgaattgtttctttaattaaatttttattttttttcattatttttcctttattttagtaacttatctttataatttctttaataattcatatttttttactttttttaaatttgataaaaaaattatgaaaatattagcaataaataattttatagtaattctacttttttaatatatagaaaggctaaaataatgaaaataatagcaaaaaataaagttgcatactatgattatgaaattttagagacttttgaagcaggtattagtttaatgggttgagaagtaaaatccattagagcaaataaagtgaatttaaaaaattcttttgcttattttaaagatttagaactttattgatcaaatgcacatatttctttatacatggcagttaaaggtgatgaacaaagaacaagaaaactccttatgcacaaaagtgaattgaaaaaaattcattttaaaaaaactacaaatagacttactttaatccctttatccttgtactgaaagcaaggaaaaattaaactagaattagcacttgcaaaaggtaaaactaaatacgacaaacgtcaaagcgaaaaagctaaagaagaaaaaagaaaaattgaaaagatgttaaaaaattattcttaaacactgaaaagtcttctttttacttcttttttctacattagctacaacttttatttcttgtcaaccaaataataactttgtacttgacaacattaaaaatgaaaaagaattactatctaaattagaactacccgaacaaacaattattgttaaaaaaacgactcgtttacaagttagtcacagctatctttttaaaatcaaaagcaattatgacggagatacttttaaagatatttttgataataaaattagattatttggtgtggatactccagaaattgagccaaaaaataacacaagatttattaatataaaaagagcaaattactatgctcgtaaagctaaagaattcagtgctaatttacttcaaaaatgaagcaatttggcttatgcaactattgttgaaaaagatccatatgatagatatgtggctaaagttagaattcaaaaacaagatttagcttctgaattattaaaaaatggtttagctgttttaagatattttcaagtagataaaccaaagaaaaaatactattatccaaatcataaagagctttatactgactacaaaaaccttcaaaatgaagcaaaagataaaaaaataaatgtctgaagtgaaaataccaaatcaatttatggaattaatcttcaatatatttcaaaaaaacactagcaaaagaagcaatttcacgggtgaaattttgaataacattgaaatctatgtttgataacaatacttcaaattcctttgcttttgctcttatatttttatatttttgttctatagaattagatgaatcttgttctataaaatcaaaacttttaaatgagtgaatatgaaaatttcacaaatctttagaactaaaatatcactgactaaaatcatagaagtttaaattattagtttcttcttttttaataactgaatgaaaagcttgtacatacaaatttgaagttttaattttatttttataaaaacttcaactttttaatctatctattccattgtgattatatttttttgttaaacataaaaacttttaaaactttggttaaatagatatatctaatttcttgatttttaaagtcaatattagtatttggtaaaataattaaattaattaaattctcaaatttttctacatcatctttgtataaaattaaaaatctaactaaaattatttcatttaaatattcatacaatgcacgaattccaacacttaatgaattaaaaaatatgtatgttcactacttatcttgagctgctccataattaaagaaaagcttcaaatatgtttaaattggcactgaatttcaacttcagatatacttcaatcaaaaaaactctcaaatttttgcaaaaacttttctcttatttcaaagtcataatttagttcttcacatttttttaatttttgttgacctatgttaattcaatttgaatttttattatgtcttggtcctaaataatgagcaaattttttaataaaattgtcactaattgggaaaatttgttcatttgctttaaataatttaaataataagttataaatattttcaatttctatttcaagctcacaattattaactaatttattttgaattaaatcgtattcaacattaaatatttgctctaaattagcttcaaaatttgattttgttattagtttgtttaaaattttttttgcattttttatacttaagacttcaacgtttttattaattaaaatttctaaaatatcatcttgattttcataatgaatttttaaaatattttctataaaaataaagtctaaatataaagttcaaatttgatcctctttaatacctaaaagatgaaaaatattatcttgaacttgtttattttctaataattgctcataagttatgatcttatttgtagttaaaatattgtaaatgtctaaaatttttttaccataatttaaatttaaaacacaatctgttttttgttcaatattttcttttaaaagtaaaataatttcttcagttttcaaacaagaaagtacattaatattttctatatttttaaaggaaaaatgatactttttagtatgaacatcaatttcgtttaaaaatttaaaaatttcattttttaccttagtatctataatcatatttttgattaattttttaaaaatttgatttttataaagtaattttaaagcagcaacaacacggttaccttttaaaacaatatgcttagttccttgatttaaaacaataattttgctaaatctttcatcatatccatgaattaaaatagaaaaaacaagctttttaaaagtattaaaaaactttaaatttgtaacatcaaaataatctagtctataaccaaaaaatcccattgtttttatatttgttgtaattctaaataatcattgtaaaaaatgttatcttttttaatttcttcaaaaatattttcttttaaaaaattaagatcattgtgtctaaaattatttaaactaatttgtaaatcatttagtgcaactaacttcatttaatcaccttttaaaattatttataaaataaagtaaatatgtataattataacaattcgtgtgtaagagctaagccaaaaatcaattatagaaattagcaaattcacaacaaaaacacaaggggaaacaatttttaatgttaatgttaaaaagaagacatttatctgtgtctgaatctgttggaaaaggacatccagataaaatttgtgatcaaataagtgatagtatactagatgctattttagcaaaagatccaaacgctagagttgctgttgaagtaatggcctctaatagattaataataattggtggtgaagtttccacaaaagcatatgttgatgttgtaaaaacagcttgaaaagttgtttttgctattggatataacgaaaacgattttactattatttcaaatgttaatactcaaagtgctgatattgcaaaaaaagttgacaaatcagatacattaggagctggagaccaaggggtggtttatggttatgcttgttcagaaactaaaaacttttatcctttatctgcttcacttgcccatgctttaactaaatatgcagaagaattaagatcgaagaaaaaatttccttatgcaaaagctgatatgaaatcacaagtagaagtagattttagtaactgggaacaaccaaaaattgtaaaaatgataatgtctgttcaacacgaagcaaaaattgatgataaaaaatttaaacaatttattcacaaagacataatgcaaaaaatagcacaagattatggtttgaaccttgattttgaaacaataatcaatccaggtggtcaatttgttatcggtggaaccattggtgatacaggtcttacaggaagaaaaataatagttgattcttatggagatagagcacatcacggtggtggtgcttttagtggaaaagactatacaaaagtagatcgttcaggagcttattttgcaagatgaatagctaaaaatttagtagctgcaggagttgcaaaagaactagaaattcaactctcttttgcaatcggaattgctgagccaatctctatttctgttgagcaaattcaagctggaaaatttagtgaagaacaaatagttcaatgtattaaaaatgtctttaacacaagtgtcaaaggttttgtagaagatttagaacttagaaaacctatttataaacaaacagcaacttatggacattttggaagaaatgatattgatcttccttgagaaagactaaataaagtaaagcaaattaaagaatttttaaaaatttaaatattttaattaataaaaatattttaatttttagtaaaatattttaatgtttttcaaaaaattaaaaattttgttagctagcacaggtgcaataaccacaggtgctcttcttttttcttgtcaaaataatcaaaattctgaagttttagaactcgaaaataatctaacaaagcaaaaacttcttgatcaaataatacaaattcctttatttattgaaggagaagatgtagttaaagtaaaagataatcaaggaaaagacttatatataaatttattagattattctttatactattatttaaaacaattagaacaacaaaatatttttgaaaaaggaataagaaacaaggatatagttccaaattcaaaagaaccaaatcctactataaaagatgaaaataataacgatgttctatatggatacaattatcatggtatttccgaactaaaagcaagtgattttttagcaaagtgaaaagaaaatcaagctaaaaataatatttgatacttaaaatatggagatggattctacataaataatccatttttcaaaaaatataacttattttctagaatatttggttgaaaccaagatcctaaagttgaacaatctgttggatctttaggaactttttgatgaaatattgattactctaaattagttccattagtttttgatgctaattttcaaagaaaaaaagacttattagcacaactagataaatttacagttacaaaagaaaaagaagtttataactttgatgctgataaaaaagttaagcaaaatcaacaatttagagttcaattaagagctagttttgaatttgacaaagatacaatagcagatgatcaaaatcacgaattaaaaaatataatttttaaattatattgaattcaagatccagaaaatggaatcaactatccagatgattctagattttcttattctggactttattcagaacctatttcacaaataaagaaaaatccaaagattttatttgcacaaaggagaattaatgtaaagggttttatcggaattgatttccaagcagaaattaataaatacgaagaaagtttagttaaagaaaaaattaaacaaaatcaagaaaattcctcagttaataacaacacaaattaataatcaatcttaaaaaatctttgttttttacaaaaatacatttttttataataagaacttatgttcaaaaggagcgaaaacataaatataattttatatttataaaaattaatgttatttgatacatgagcatctgcaattatttttggcctagctggattaggtttgtttatattttcagccaaaattttatcaacatcactaaaacaagttagtggtcctaaatttaaaaaacatatttttaaaatctcagaaaacagatttgttgcaatgatgtttggtataatttttaccacacttattcaatcctctgatggttcgatggctctaattatggggcttttagctgctggtataataaaattaagaggagctattgcttttttattaggaacaaatattggaaccgctaccacttccttaattgtctcatttcaggcaaaatttgcttttacggaatattttgttttattactagtagttggtgtttttggctatcttctaataaaaaaagaaaaaatttctaacattttttacattatttttgctattggtttaatatttttatctttaaaactattaagtgctggttcaaaagtaattgtaaaacaagaacaatttaaagaatttgttaaagtagttggcaaaaatgcgtgagcttcatttttcttctcatttgcactaacagggataatgcaatcttcttcagcaactgttactttatatcaaagtatttatgaaggacaattttataatagcgccggattatgagaaattccaaatccacaagttttaaatttacctgcagctattggtttagtttttggagctaatgttggaactacaataacaggatttatagtttcatttacaacaaaaaactcaaactctaaaaaaattgcacttgtttgaggatttaccaacttatcaatttcaataattattttaactattattggatactacagtaaactaattgaattaataattcctttatcactaaaagccgcatcacttcagctttctatggctcacttactttttaatactattttagtttttatttatattttcttaattggatacattgtcaaaattttaaattggctcatcaaagatgaccattttgagaaaaaatttggatttattctttctaaagaactaattaaaacaaatacatttttagctcttgaacaaggaaaacaagctttaatgtctatgggcaaaatggtttttgatggacttgaaaaaatggaagaactaaccaaaaaaagaagtaacaaaattaaagaacaatataatcaactagaagaagttgttgacaatgcaagaaaaaaactctattttttcttaatagaattagggcaacaacaactaagcaatcaacaatctgaaattcatatgtctttaattttatcttctagatctcttgaaaaaattcttgatattggaagtgaaattattgctgaacttgacaaagtttataatccaaaaaataaaactcaatttttaataagtcaagaagtaattgatgacattgctaaattacttaaaatgaacaaagctattttaaaaagttctcttgatcaaattaagtattttaaaaaagaaaaaagtaaacacatagaagaaatgagtcacgattttgatgaactttcatttaaatatgcaaaagaaaatgttgctaaattaaaaaccagttcaggaaaaactcaattagaacttgactttgattacagtcgtgtattaagatctttagaaagaattaatcaccatagtttaagaattaatcattacttaaaaaactcacattgagcaaaactaaacatttattaataacaaaaaaaccatctaatttttagatggtttttttgttgaaaatacttcttttttctttgtgtttttaaaattattcactaattttgtttagttaaatatattaacacaaagcttaatttttaacacctttaatactgcttcaaaagtctttaatttcttgctatgaattagatttacttttgttttttaacatatctcaattccgtttttaaagtagttttaaaaagctttggtccttatacaacttataataagcaatatttcaaacttgtttactagatttaaaacatttttaataaacaatttctcttattgtagttgttttaaatctaaatgttgtatttaatagattgtaatttgtttttaatactgatattttctattttatacattatctttttgtgtagtagttaagaaaatatcaaaaatacttacataagctacattatgagcacttgggaaaacaatttcaatatttttaatataatcatttacatcaaaagtataagtcaccatagatttatctctggatagaattggttgttgtttgatacttaacttggttgtagttccgtttttattagttacatttactataaaaggatctttaatgtatttatctgctcctacttttgctggtcagaaataatctggatgatttttaaatttgagtttaatttgacctacaaaattatgattttgagatcttggttttacataaaattttatatctgcagatccaggtcaagcaaatcagtaataaccatttgcaaaaacattttcaggtttgtaatattgcaatcatcaactaccgtattgagttgcatcagcaatccagtgtttatttaattctttatcatcaataattttattaagattgcttcaagaaatatcaaaatatcttgtgttagctaaatattcaatattatattttaatttcaaagaaccattttgattattaacattttgaaattcactaaattgcaaaagatttttgtatttttcatctactaaatttgaaactgtttgtacatttactaaagatggaattgatttatctgagagtttttcaagttgttgttttactttagatgcaatattgtctaatgcttgaatatctaaaattttgtttttatttgaaagtgaaatttcttttgcgtttgtaaaattattattattattatttgctattaataatttttctattaagtattttccttcttggttaaaaattgaagataatttcacacttattatattagtttgtttattaaaagttatactatctttttggtttgtaactatctctttaacttgttgattgttttgattttttaacattaatttgtatttactattagttaaatcaatgttagtgttgatttgaaaatctagttgtcctgtttttaaattcaaatctgaaattgagctaacttcaaactgattttcaagttctcaaggggtaaacaaattaaaaacaatattattgtgtgcatcattagctgaattagtaacttctagtttagtaattttatattttttattcaattctagattattaaatgttaaatccagttgttttttattgttgttgttgttgttatctttaattgtaccagttatttgatgtgtgtttgatgaattatttacttcttggtaaaagacttttacctgtttattttgactgaaatccacttttgaattatttaaatctgtattgatatcaacactagcatttagtgagttaattgttcttgattttatttgaaaattagaaaatgtttgcaagatttttaaagaatcatttaagtttaaatcttttgttgtaatttttataactttgttattagtatcttttaaaatcaagaattttagttcatattctttattaacaactaaattatttaaatccaaagtgtaatctaaagtgcttgaatctttaatttctacttcagaagttgtagctaaatcattatttttactttggtattctaaagctattttatgatttaagtatgtaggagtaatttttgaaaaattaagcttgattttgtaagatgagtgtttatcagttaatgtttttggatcaacttctcttgttaatgtaatatttagtcatttttcattaataaaactgattttatcaaaatcatcttttgcattgtagataacattgtcttgtgcttttcctagattttttaatgcttttgttggttttaaagcaagtttaatcatctctaagctataaatttgatcttgttgtaaattatctaattcaagttcaattttgtaatcattagtagaatcttgtgttatttttgctggatgttccaaagttttatcttcgcttgtaaaaacaacatttactgcttgatttgcttctaaaagattgtctttacttgataatttaatatttactttgtagtgattatccttgatttttaaagcaaaatttgaaaaatcaaaatctagtggttttgaattagttataaaggttttgtttatgcttgaatctagcagaattttgtctgtataatcatttttgtaagaaatattactaatttggtaacttgtattagaagtaagattatcaaaagtaaacactaatttattatccattattttagctgttgatttcaataattctgcaggtttattttgattttttagtgttaaaactacttcataatctaaagcaagttgtgaaaaatctttaatattagcttcaaattttaaattatgatcactaagttctagagtattaattttatttattattgctactttatcattttggatcataacatcgctagtcggtactacaggatttgattttttgaaaaaactcatttcgataacttgtgaattaaaatcaagtgaataattatttttagctataacagcggatacaagttgataatttccttgtaaattaattttttcagaatcgatattaatgactccatcttgattagtagaagcttcaaaagttgtttcttttgcattgtttttgtctttaaaagttaatttaaacttttcattagcactaagcattggattaaaaattagttgatttcctgcatttgttgctttaaaaataatgttttttagatttacttctggttcaaaagatttaattaatgtttttgcttgattatcaacataaagtccgcttaataaataaactactctagtaaatccgctttcaactattgggtactttaccaaagcattagattcattatccactgaaacggcaacaattttgtctaaactagtatcatttacaaattttgcaaaaacaacttgatttttgtatttagaatctaatttgacttttgcaaatatgctatataaattgtcttgcgcttgtctgttgctatattctaattgatagcctaaattagcaaatttgtctttttgttttgataatcctacacctagtcctatagcaagcgaactaatagtaatggtactagctgaagctaataaaataattaaagatttttttgatattttcataatatttccttaaataataaaatttgttaattgatttaaaaaataaaaaattacaacaacaaaaacgtgttgtaatttcgaattataatactaaaagtctaggttttttgcatattttgcattttcttcgataaataattttctaggagctacatctgttcccattaattcttcaaaaacttgtgaagcaataattgcatcctgaatttgtacttgaatcatttttcttgtttttgggtccatagtggtttctcagagttgatctggattcatctctccaagacctttgtatctttgaatgctaactttttgatttgaaaattcttgttcaattatttgttctttttgcttatctgaatatgcataaacaacttttttatttgctgaaattttgtaaagtggaggttgtgctatgtaaacaaaaccgtattcaattaatggtttgaaaaatctgtataagaaagtcaagagtaaagttctaatatgtgaaccatcagaatcggcatcggtcataatgatgattttataataacggattttgttgatattaaattctgcaccaatacctgtaccaaaagcggtaattaaagagagaatttcttcgtttttaagcactttttcaaaattagttttttgtgaattaattactttacctctaagtggcaatatagcttgaaaatgacgatcacgacccattttagcgcttccaccagctgagttaccctcaactatgtaaagttcgctaatttgtgcatcttttgtagtacaatcagctaattttcctggtaatgaattaatttcaaaaggtgattttcttttaatcgcttcacgagctgactcagctgcttttcttgctttttgtgaaagcaagttacgctcaataatttttcttgcttggtctggattttcagctaaaaatctttcaaatacttcagaaaaaattttgttaactacagaacgaacttctttgttgtttaattttcctttagtttgaccttcaaaaattggatttgaatgtttaattgaaacaacaacatacattccgtctttaatgtcttcacgagaaaatttttcttgatctgatttaaaaaatttattttctaaagcatagttatttaaaattctggacaaagcatcaaacaatcctgtttcgtgtgttccaccttcacggttgtaaatgttgtttgtataagctagaacttcagaacgatcttcttttacatattgtagagcaatttcagcttttgtgtgatattgatcggttgaaatctcaccttctgagtaaataatattatcatgcactttttcagaaccttttgttaattcacttacataatcaattattccaccagcaaataagaattctttttcgaaattatttcgttggtctttgacaataaattttaagttttttgtaagataagcagtctgcttgagtcgatctaaaataatatctaaacgaaaatcatttacttccataatagtaaaatctggtttaaacataatggtagtacctgttgaaaaatcaggtactgtgtctataacttttagatcgtctattttttttccaccatctacaaactcttgaaaataaagcttgccatctcttttaattcatacttttaaattagcacttaaagcattaactactgaagcaccaactccatgaagaccaccggaaactttataagaacttccatcaaattttcctccagcgtgcaaaacagttagaacaacttcagctgctgagacgttatgttttggatgtataccaactggaatcccacgaccattatctgagacttttacataaccatccgttgtgatttcaactgtaattgtatttgcaaatccagctaaagcttcatcaactgcgttatcaactatttctcaaataagatgatgtaatggtaaaattccagttccacctatatacattccaggtctttttcttactggttcgagtccctctaatgtttgtatgctttctgcttcgtaattttgatttgacattttcactcctaactactaattgtaactagtgctttttatatttaaaaattatatcattttttgacttttttaaaaatctcaaagtaaacatatttgtttattttgaacaactttacttcttttttcttcatttataaaaaatactctaaaaaatttttagagtattttaatttagtttatatcatccataatattaatcacttcaatactttgattatccaattttgtatttaattttaaaacaacagcattaaattgtgagtagttatttgacgctgtaaatttgatcattttatcataacgcattttttgataaacctttaaaaaatcagcaccaatagcttcatttctagggcctgtcataccaacatctgttatataaagtgttccttgcgataattttcttccatcagaagtttgcacatgtgtatgtgttcctactattgcattaatttttccatttaagtaaatagataaaacatttttttctgaagtggtttcagcgtggaaatcaacaagatgaaaatcagcttcatcatctaaaatcactgcgtcaatagcatcaaaaaaattatttgcatattcttgttttcacggtttgatcaaaccattaaatgaaatacccaaaagtgaagtaatgcggaaatttaagttgttttttctataaactacacttccttgtcctgggtaatcaagcccattaatatttaaaggacgcaccatatcgttgttgttaattatttttaaaatatcaggattagatcaaacatggtttcctaaagtaaaaacatctacacctgcttgttttaattctaaataatccttttcatttagcccttttcttcctgaaatattctcgccttgaactacaactaaatcaaaatgatatttttgatttagtattgggaaatgttttttaaagcaagctataccaactttggaaaaaatatcacctacaaataaaactgttgctgattttgtcataatttctctcttttaatatggttttttcaatcaaaaccatttagcatttttgtctgtatttcattgctctaaattaagattataaattaaagaaagtgaatttttaatttcatttgagactaaaagatttgcattggtgaaaaagttcttagtagctaaaaatgattcttgagatttgtaaaattgcgcaaagatattggatttaaaattagttaaatctttaatttcaactgcttgaattgatcaaaatataggataagtttttaatgaaaatttaagtttgtctttttcaagaaaagataaagcttcgattatgctttcaaatatagtaccaaagttgttattattaaatttatgtttaactaatattgttaaaaattttaaatctgaattagaaaatttttgttcagaaaagtaaaactgaatttttaaatcatttaatttaaaaagatcttcaatcatatttaagtgatcaaaattaaaatctctatctatcaatataaaaagaagatgaaactgatttttatacgaagttaaaagtgatttggttgtgggaatgggtttgtctaatgttgcttgattttgttcactaacaataagtgcaccggatgaatttaagtttttaaaagcttcaatttcaacttttttattttttgaagctttttgattaccttgtgcttgatttttctttgtttctttaacttttatcaatgattgaacatcaatttgtttattgattagcttttgatcaaaaggaattatttcaagtttttgctttttggttgaatttggagaatatggactaataacaactcttcactttttattattagctacaaagtgtaaattattacctttttcttcatttgtcttacgatgcacaggttgcaaatttttttctgaattgagatactttttaataacagatattttggagtgatctattttatcaagtatatcttgtggaataatatgatcaatatctcaaaaacctggaaattgatcagagttttcttcttgtacttgtgaatttttcttgtgatctttaataatctctctacctgcaaaatccaggcattgagttttatttttacaataattgtcaaaaatcttatctttttgttttgccgatatactcatcgattttattttcctttgttgcgcataatagaatatattatttatttttaaatatttttttattaacttaatctataaaaatttactaaattataagttattttaaaattttaaaataaaaaagataagaaaaataaacaaacacaatgaatttttattaaattattctttgaaaaaatttttaaacttttgaattatcattttgcttaaaaattagaatttttaaaaaaataattattatttttaaaaataggaaaaatttggatttaaaaagcaaaataaagaactttattttttagtaaatattacaaaaatgctttatttttgaacattttagagttttttatttgaatattttttattattaataatactaaaaataacattgaaattttgatctattaaagcaatattagctaattgatctacctggatatcaccatataaatgtgttaaatttagtgatttagcaacattgtgtgatgatacttttactaaatctaatcaactaatattagtgttgtgttttaaattttttagaactttattaaactattttcctgaatctgcaattgtggaagaattatgaacatagaacaaatctgattttttatcaacttttaaaggtccaagatcataaattccattttttaaacctttttctggcaataaatcagaaactatgcaaacattatcaatatttaatccatctaaggtaaaaattaaagttgaatttttaatatgcaaaccatctgcgattagctctactaaaaagtttttacttaattttgtttctaaaattaaatttactaatgattcttgcctttaattaaacatcgaacaagcattgtaaaaatgtgtaaatcttttaaaagtttctaaattatgtttttgtgaaaagttataacaatttgaatgtccaattgcaaaatcaaaaacaactttatatttttttaaaatagattgtgaattattttcaggcgcaatagcaattgtggctctaaaatttaagtaattttttaaatattctagatgttattttttaactgaaataattaaatcttttatatgtgcacctttttttctttagaaataaaaggaccttcaagatatcaactaagtataaagttttcaaaattattatggattaaattgaatttttcactaaataatttaattttgcttcaagaatcagttactattgttgcacaaacagcagcaataccttctttttttatccaaattatgtttgtatttcaagaacttttttataaaatcagtttcagcaattttgttaaaagaaagtccatatccaccatgtgtatgtgaatcaataaaagctgtaagcaaaacgttttgcttacagtcaattccttcttcttgtgtggttccttgtcctatttgttcaatttttccatctagatttaatcttatttaacctaaaaattgtttgtcttttgtagttatcaatgcattttttagtatcataatttcctttgttaaatcataaatgaatatagctaaaaatactgaaattatgaaattttttaaattacaaatctctttgtactttaaagtagtttaaactgactttgtattttataacttgtaacagtttttgttgtttgtaaatacttttgtaaataatttgtgaattttctgtatcaaaagtataaaattctatttttttacttttaaaattgtttaaaaatcatttactaatttatatgatttttctatgtttcaaaatccagaatcttgatggattaaatattcaacttcaattaaaagttcttcatttttatagcattttttcttgtaatatctaaaattgtctaaattatcaagtttttttaaagctaaattatttactcaatttgcttgagttttgtcttgattttcttctcatttacaaaaacttaaataatatttttctagcaaaggttttattgtatttactacttttttaacaataatttgagaattttttcttagttgttcaatgtctaattttttaactttattaaataaaaagataatgagtgttttagaaactttatatttattaattaaaaaattgatttgttgttgagttaatggttgtttggaaaattttaaaacataagaagataaatcttttaatatttgcaaacgttttgatttgttatttttaaaattacttaattgtgtttgattattttctttttcatcatagcttttaaaaaattaaaacaaaaaatagcaaaaatttgctattttttaaaacattattattaatttgaattaactttatcagaaatgatttttagatttttattttcaattaaagtttcagtttttcttcctaatacttcaagttgaacagcagaagaagcattaactaagtcaactgaagagattttaccaatctcacctataaatggaccttgaataatttcaacaactgttcctactttaaatggagaattaataatcccgaactttgcatattcaacaagtttttctctttgtttttcttccatttttcttatttgtttttcagaaactggtgttggttttgttccttttcctgaagaaccaattagccctgtgatatattgagtatttcttacaataaatcaaactgcatcattcatttgcatattaataaaaatataacctttgtataggttttcttttttttctacgtatttttcaccttttaattttttttcatattctttatcactaatagttgtaatttcaaattttttaatttctttaaagtactgttctaaaccttcagatttgattctgttttttaaaagttcaatagctgtatcttctttatttgaaattgttgaaatcatatatcatttaaaatctgtcatcatttctctctttatagacctactcctgttctatttcaaagcacggttgctattgttaatataatgaaaaatacaatagttgcaactaaaataaaaattaacactttaaaataatttttagctaaatatgagcctgttggtcatttaactctttttagttctttaaaaaagtgtctaattcaatacttttttggtttctttttcttgtttttaaatttaaacattgacaaaactttctaactatttatttttcttctttatgtgttgtacttgagttacattttttgcaaaactttttcaaaaccagtctttcttgagaagacttattaattgtgtagtttttacttttacattctatacaacttaatgaaatttttgattttggcatttatgcattataacaaaaaaatttaagttataaaattataatatataagtatcaattttctttttaaattcttttaaaataatatttattttttgtggactaacatttgttttagaagaaatttgcttagttttaaagccactgaagaaataatgaactaaaatttctagctctaaatcatttgtaatatcaaatgttttttgcaatcactgttttggttcattgtgtgaataaacactttgctcataaatatctgaattaggatcttcaaattcaaactcatattcttcataatttaaagctaaatttaaaacttgatgagattttgaaacatatttttttgaataattaatcattaaatatttaactttgtaaaagagatatttttcaaacgagtgttgttgatttttatcgtaagaattgacaatgtcaactaaattaaaaagactataatttactaaatcttctcagtttaatgggatattattataaattttaattacgctttttgcactagctacaaaaatgtgtttgtattgattatatgtttttcaaattaatttattgtgatattttgatttcaaaaaaactttatttttacctcctaatttttaaaaaggataattcctgctgcaactgaaacatttaaagattgaacagttccttgcattggaatataaaaaatttcatcagattgatttaataaagattttgaaattcctttagcttctgagcccaaaacaatagcgcttggttgattaaaaacaatttggtctaaaggttttgcagtttttgaaagagctgaagcataaattcagaaattatgtttttttagtttttcaaatgtggctaataaagaattaactagtataaattttatcccaacaaatccacctgatgatattctaattacactatcattaattttggcacaattatcttttggtaaaataatatgtttaattccagctgcatttgcgctacgaataattgcccctaaattatgattgtcttgaatatgatctaagaccaaaatccttttgggattatctttaaaaatcgactcgattggaaaatatttaacgttttcaatttcagctacaaaaccttgatgattaattcctttagctaatttatctaaaaaactcttttctactatgtgcacttgataagtgtttaaatttaaatttggcactattttagttagataaatttttttaatcggaacgttattttttatcgcgtctaacaaagaattcttaccgcaaatgtatttaaccatgatttaattcctttagtgtctaaaaaggaaaaaattatgaaaaaataaacttatttcataatttttctctaattttgtcagctttttgataatttttttctgattttaatttttttcatttctctaacaaagcaaaatcagttttatttagtttttttgttgcaaaaataaagccaagaacgttgaaaatgaaggataaattagcataatccttgttttttaaaagtaaattaagttctttatttgcttgtgcaaattttgattgtaaaaataattttaatattggattgtatactttttttaaagattttcttggattaattaagtgttcaaaaaaagcttttttatattgaattattttgtttttattagcttctaaaagttcatttgttaaatcaattggtccagaaatagaactagttagcaaaatatgtctataaacatctggatgatatttttcaacaaaattatcaactaaaaaaacgttatttagtgacttagacattttttcattattgattttgatttggccaacatgaactcatttttttgttatatttttcttagttagtgcaaaatgttgtgcattttcattttcatgatgtggaaaaatcaagtcaataccgcctgagtgaatatctattgtttgtttattaaaatatttaaaaattaaagcagaacattcagtgtgtcatcctggacgtcccaaacctagcaaagaataatacttgattcctagagttgttttttttcataaaacaaagtcattggcgttggatttgtattgtgttttgcttgatgaaacaagtgaatttattttttgacctgaaatgtgaccataatttttaacttttgaagtattaaagtataaatcatcattttcttgataagtaaatccttgtttttgaagcaaataaatataatttttgatagtatttagctcatttgtaactttaactatttttgttggtttttgaatattaaaaagctttaatttcttcatatagtctttgtaatagaactcagaaatttctgcttctgttttattttctaaaatagcttttttgatgattttatcatcaatatttgttatattatgaagaaaaaacaactcatatttgaaatatttttttactctgtttaaaatgtcaatggttaaaatgggtcttaaattgccaatatgaatataatcataaacagttggaccacaaacgtaaatattttcttttttagtcatattgatttctatttattttttttctaatttctaaataatcaggtttgtattgagctactaagtttcaaaatttatcactgtgattattaaaataaaaatgtgctaattcatgaataataacataatccaaggagtttttactaaagggaaaaagttttttggaaaaataaatttttcgtttgcttatatgattggttgctcaagcacttgttttatttcgaataaatacctcaaaatcaggtgtgtgcataattttgcttcaatacaaaattcttgtttttatgtactttaaaagctttttattgatgttgtcaataatttgtaattttatagtatttttattaattgattttaatttaaatactaaattttgtgcatataaaaaatactcattgttagttttgattaagttaaaattatatttttgacctagaaaatagaagtatttttgttctagattaattggaacaagattgttggaatttaataataattcatcaatttttggctttaacaattctagattttgtttgattttttctaaagaacaattggtcaacactcttaatttgccatgatctaaacgaactgtgaattttaaatttttgtaattctttttttcaattatcacttcatattcaacaccattatacaaataaactagcttagaattcatctttgatagctttctttaatttttttacattagctcttgaattatcaataaaatgttcaattaattggaaaattctcttttgatcttcataaccaatgtaattgttaattaattgttgcattagtaaatctaatttaaatcttaaatcaggttcaaaaattattaaagtatcattttgataatcaaaataattactaatttctaaagactttgtttttgaagaaaaaataaccaaagaaaagaaaggaacaggcatatttaaaaatttttgtagcttgataatatgcattttattttgcacaattggactataaattttatgttggtgattaaaactagttttagttcaataattagagtaaaaatcacctttaataaaaccatttaaagattttatttctactacaattactgctttccgagttattaaaatactatcaacttcaaataataaatctccttgttttaaaatagaagaattaataaaaaaactttgattatcaatagctcattgaagtaatttatcatttacttgcttttcatattcttttcctttattttgctttaagattttggtatataaagctcgaaagtgaaagaataatcaaagaactaaaactactaatcaagataataaaacaataacactacctacaataaatcctgtattattatccataattagccttcatttttctttgtgatttgaatttcactaacattgtgtgatttgtttaaaaccttgaaagtaacttgaaaattttcttgtggatcttcatatgtaaattttaaattattaattaacttttgtttgctatgatgttctaatcaagcttcgattgtattaaaagatgattcaagattgatatttaattgttcatttactgtagctactttagtatcattatttacaataattgaatcttcaaaaatttgataatattctagctgatctcgataatcatattcatcataaattggaccaacaagtgtctctaaaatatcttcaagtgtaataattcctattatattttgtgaatttttgtttttgttgttagttataaagccaaattgtgatttagtttttttgagtttttcataattagtttttaaaagatcatttgcacataaaaatggtacatcaataatgtaatcatctatttgaaattcctttaaaaagaaaagatccttaattaataaaattcctataaattttcctttttttctaactggaatccttgaaaaccttgactctttaaatatatctaaaatttgttctaaactcatatcatattcaacaaaaacaacatcttttatccgtgtaaaacagttaattgttttaatagaatcaaaatccaaagctttaattgctaaattagattcttctttttcaagtacaccttcataggttccttgttcaataattttttttagttcaatttctgtattagttactgaattttctttgaaaattttggctaaaacaagggcaattggataaaagaaataataaaaaatagctattaaaagtcaagtatttttcaaaaacttaatcggaaattttctagcaattaatttaggaaataactcacctaataaaacaataattggagtagtaatcaaaattgaaacaatcaatctcaatgattcattaataataaaagcacctaaaagtgtggataaaacaatggataatccgatattgactatattgttacaaattaaaataactgtaaaagtttgtgaaaaattatagaacttgtgcaaaattgattttttagcaatagattctgcttttaaattttcttctagttttactttagaaacacttgcatacgctgtttctgaagcagaaaataaagctgaaaaaacaactaaaaagagtgtaagaataaataaaacaattatgaaactactctccataatcatccttgttttcaaagctttgtaaggaattagatttttcaaaaaaattacctgttgcaagatcaaaggacattgaaatttctccaattggtccgtttctatgttttgcaataattagttgtgaatcttgaatattatcatttgtttttttgctagcataataactttcacgatgcaaaaacatcacaatatcagcatcttgctcgatagaaccagattctcttaaatctgaaagttgtggagttttcttttcccttttttctacttctcttgaaagttgtgatagtgcaataatcggtgtgtctaattcacgtgctaattgttttaattttcttgaaataattgaaacttcaacttgtcgattttcatttcttgtttttgaactagaattaattagttgtaaataatctatgattattaaatcgatttgttctttttttctttttagtctttgcaattttcaaatcatttcatttaatttaattgttcctgaatcctcaattaaaagattgtatttattaattttattatcaattgaagctttgattctaattcagtgatcttttgtaagtgcgcctggttttttaaaaattgaagcatctatcatagtttcaagtgacaacaaacgtgcaacaagttgttgtgaagacatttccaaagaaaaaaagactactttttttttcgcatcacatgcatttttagcaagatttaaagcaaaagcagtctttcccatagaaggacgagctgctaaaataattaaatctcctttttgtaaacctgaagtcatgtgatttaacttatcaaatccagtggttattcctttaatatcatagctatattgctgattacgcaacattgtaagtagatcttgtgcaacttgtgcaatgctgtcaaaatcttgtttagcattgatcgaaataatttgattcattttttcttgaaattcatcaattatgtcatcacttaatttttttccttgtgaaatttcttttttagattgttcaaaaatttcaagaatttttcttaatttcgttgcttcagaaatttttttgatatattcaataatttcagcttcaactacatattcatctagtgaaagactcaaaatatattgctcaccacctgcttgttgaagcttgtttgttcttgataattcgttgattagtaaattaatatcaaaggtttttgtgctttccattaaatctgataaagcattaaagataatacgtaattttgcactagtaaaatcttctatagataaataattaactatattaattcattcattgggataatataaaatatacgatattattttttcttctaaatcggtttcgtacaacctatcatatttattcatcttttagaacctttatccttaagttagcacttacttcgtgtgaaagtttcacttttaaaatgctaagtcctaaagaagtaatgtgcactttttcaactgtgtgtttttcaagatgaagacctttttcttcaagagctttaaaaacttgttttgttgaaattgaaccatgtggatgatcatttgtgaactttaatttaaattctaaaataagtgcttgaatttgttcttttagttgtaaatctttttgatgtttttcttctttttgcttgataatttcttgttttctataatctaattcttttatattttgttcaacataaggaacagcaattttatttttaaatagataatttgaagcatatccaggacttacttcaattactgtgtttgctttaccatcttttgaatcttttataagtattactttcattattttctccctgtaattgcgttaataacgttgtctttaaattctaaaaatgtctcagtggttgattgagctgctgctgcggaaaaatgaccaccaccccctactaactctgcaatgtgttgcacatttgtatttggtaatgaacgagctgacattttgtaaacatttgaatttggtaatttagcgattacaaaaactgcttgtcttttataaatatttaataaataatccgttgctattgaaattaaatctgattcaattgctttatcaatagctgctaaaaaatatccaggttttacttcttctaaacttttaattacctcgttaattatagtaaaatcttcctcagaaatttttaaaatattaatagcttcttcaacagacgctcctcaacttgataaaatacttgctgcattaaaggtttttgaagaagatgatttcttaaattgcactgtatccatataaattccatttaaaagcatttgtgcaaccaatggtgaaacaattttatcatcataagaattaagagcaatgaattcagttataatctcacaagttgaagaagctagtgtgtcaatataatcatttccataagttaaaaaatcaggttttccagaagttactccatgatgatcaaaaatgaaaatattatctttattaatatacttaaaagcatctggattttcaattcgcgctttttctgctgtatctaataaaataactaaagtgtttgcgtcgtttagtaatgttgctttttttggtttaataaaaacttttcgatcaattttatctttttgtaagttcaaaaaccttcttgcagtagcatcaaagctatcattttgaagataaaattttttgttataaagtttgaattctctttttgcatattcaactaaaaatcaacctaaagcataagcagaacctaaagcatcaagatcagcattaatgtgaccgtataaaataattttttgaatatcttctgaagctagttttttaagtagttttttggaaacataatttaaatttgttcttgaagtagtaacactaatttgactatttcttccataagaaaatggtttaaatccatattttataattgtggtttgatttccaccacgagttttagaaaaatttagagcatcttttgctaacttatttaagatcttaaaatccttgattccaaaagcaaaaccagtagaaatagtgatatttaaattagcatttgattcaatttttgttttttctactaaatgtttttggaaaatatcaaagttatattgttgtcattctaaaaaagttgcataattaagaacaattaaaaattttccattgatatattgtcgataagtaaaatcatattcaactaataaattttcaaagaaaacattaattttgttttgaattgaaaacatttcatcttcgttcaaaatagaagaaaaaacttgaaaattatcaaattcaatttcacctataactcatgaatcatcagcatatttcgaagtaatagaatctaataaagttgtatcttgaattgacaatcaacgattagaagtattaatttgtacactaagatgattctcaccaatagaaaaatcgaattttgaaggtaaaaggaagaaattcctgtaattttcgctttcaaataaagtatcaactgattttccaattagcgctttttggtataaattgtaaataaattcagaagctcaaactatttttccatctgttgaaaaaacaacaactcctaaaccattttcggataaaacattttcaaaatgcttgtagaaaaaattgtttacattgattgatcttttataaaaatgaaaagtaacaaagaagaaaattgctattaaaatcaagattaaaaacatcaatattgtaaaaaaagcagagtttgatatatcagatttataataaactaataaaataagtcaaataattaatattgaaaaaacagttaaaaatacaaataatcaagttttcgaaactttcatctttttccttagtttttatagtaattttatatttattttactattttacaaccaaagtaacaattttatctttgatatagatttctttaacaatgtctttattttggatgtattttaaaacattttcattactttttgctttgtttaaaatatcttcttttgaatcttcatcatttttttgaataatagctcttaattttccattaacttgcacagcaatgttaacaatattgcttaaaattttagattgatcaaatgttggtcattgttgtaaatgaattggtttttgttctaattgttctagtaattcttctgcaatgtgtggagcaaaagttgaaaacataattagaaaatctactagatattttttagaacttaaaatttcttgtttataaaggtgattaatgtaaaccatcattttagaaattgcaatattgtattttaaagcttcaatattttcaccaatttcttttatactttgatgatagatagattcaaattcagcatttgagtaattttcttcataaatgaaggatttttgcataattcttacaattctatctactcattttttaattccttgaataccttcaacacttcaagctttagtatcgattaaaggtgacataaacattaaataaattcttaaggaatcagcaccaaattgattaactacctcgtttggattaatgatgtttcctttggatttagacattttttgtccatctgttcctaaaagcattccttgatttacaactttataaaaaggttcttttgtaggtacgatttttaaatcatataaaaatttatatcaaaaacgagaataaattagatgaccaacagcatgttcttgccctccaatatataaatcaactggcattcatttttcaaatcgctgatatgcttctttggattcaatgtctaaataactaccatctgcattttttaaaatataagctaaaaaatatcaagaagaacctgctcattgtggcatcgtattagtttctcttctatatttttttccttctttttcaaagaaaactcaagatttattattagctaaaggagattgtccatcacctgaaggagtaatattttccatataaggtagttcaacaagtttttcttctaaataaattttgccatcttcatcaaaataaattggaaatggttcgcctcaatatctttgtctagaaaaaactcaatctttaattttaaaagctttaacttggcttgattttccttcattttttaaatcaaaatgaatatgtgctcttgcttgaaaaattgttaaattattatatttttttgaattaattagtctctctttttcattaataacttcaataaattctatgttatttaataatgcaaattctttgtctctttcatcatgtgaaggaactcccattaaagctcctgtttggtaatttgcaattacgtaatcacaaataaaaataggaatttctttgttattaacaggattaattgcaaaaagatttgtagcaattcctgttttggaattatttttttgtttttctctagctgcaaaattttctataaaagttttaattgctggattttgattagcaagttcttcagctagtcaatgattaggggatattgctaaaaatgtggcaccaaaaatagtgtctaatcttgttgtaaaaatatcgacatctttttgcttttcttgtagtttaaacttaacatttcaaccaagagattttcctattcaattctcttgtaaacttttaagtgaggaaggaaaattcacaagttttaaatcttctaataatctatcagcatattgagtaattttaagtactcattgcttcatttttttaggataaactaaaaatcctcctctttcacttacgagttgcccttcttcatttacaagcacttcttcatttgctaaaactgttgctaactctggacatcaatttacttctacttctctaatttcagctaaattatgtttgtataataaagcaaaaatcttttgtgtttgttcataaaaaaaaggatcagttgtatcaacttctttatctcaatcatatgaaaaacctaaagaaatgagctgttttttaaaattttgaatattttcttgtgtgaatttagctggatgattttttgtacttagagcatattgctcagcaggaagaccaaaagcatctcaaccaattggatgaagcacatcaaaattatttaatcttttaaatctagcaatgatatctgttgcagtataaccaagtggatgacctatatgtaatccagaagctgaaggatatggaaacatatcaagtacataaaatttttgtaaatgatgatttgttgttttaaaagtcttgttttgttgtcaatatttttgtcatttttgttctatttttagatgattgtacatagtaataaattttactatatttttatttttagttaaatttataaaatgaaattactaatttatactttgtaacttttttttctcttatccaaaataaaaaagtataatttttaaataaaaaagaaaggaaaaaatggaaattcaacaattttttaataaggatttaatttttattgatcaagaaattaaaaacaaaactgaagcaatttctttcattagcttaaaacttaaatctaataattttattgctgattttacacaaacacaatctgaattttcaagtagagaagagcaagtatctacctatttaggtgattttattgcaatgcctcacattagaaacaaaaatgttgtaaaaaattcaataatgtttattaaaaattctaaagccattagttgaaataatactccaggacaagaagaagttaaatttatttttgctattgctttaaacgatcaagaacaagctgatttgcatattcaaattattcaacaactatctaaaatgtttatgcaaaaagaatttttacaaaaattagaagcaattaaaactcaagaagaatttctacaactaatctctcgtttttcttcagaaaatgaagaaaaaacacaagaaacatttacttctaaatttgatgttgtagctattacttcttgtccaacagggatagcgcatacttacttagccaagagtaatttagaagaaacagctaaaaaaatgggtgtaagtattaaagtagaaactcaaggtgccgatggtgtacaaaataaattaactaactttgaattaaaaaatgcaaagggtttaatcattgcaagtgatagagaaattgaaaaatctcgttttgctcatcttgataatgttttagaggtttctgctaaaaaagcgattcacaatgctgaagagcaaattaaaaaagtattagaacacaaaggaaaaatgcttaaaacagcttcagcaagtagtggtaatgcttcagaaaatgaagcacaaatctcattttatgatttccgcaaaagaatgtatcgttcattattgtcaggaatttcatatatgttaccatttattgtttttggtggaatcataatcgcctttgcctttattttagatctaattatcggagctgcttatgggcaaaatcttaattctcctgcatttttaaaaagttttggtagcaactatgcattttcaaacttaattttaagtgttggaaaaattggaatgtcacttgctgtttccattttagcagcatttattagtttttcacttattggaagacaaggattattgcctggatttgtaattggtgcgattgcaagtggtcaattagcctcatcatatggatttttagctccatcacttgcaaatgattataacttatcagctaatcaaattttaactacagggtcaggatttattggggcaatttttggtggtttttttgccgcagctatggttattgtatttaataactacattttaaaagctttacctaaaaacttacaaggaattaaaaatattttattaattcctttattagcaactattacaattgctttattattttgagctttaaatatagttttaatttatgttaattttggacttactatcttcttatccattttagaatctaaaacatacttagtgtgattactaggacttgtaattggagcaatgatggcatttgacttaggaggaccagtaaataaagctgcttatatttttgcaacatttacagtttcacaaagaggaacttcttctatttcaatggctgcagctatgttatcaggaatgatacctccattaggaatttctctttctatgtttgttaataaaaaactatgaactaaagagcaaattcatgcaggtaaatattctaatatagtttttggattatcctttatttcagaaggagcaattccatatacagctaataaaccaaaagtacttttcccttcaaatataatagcaggaatagtaacaggaatttcttcagctttattaggaattaatattattgcaccacatggtggaatatttgttgtctttttagcaagaacaaatttagtagaatctactggcgcacaaattggtttaggaattttgttctgaatcttggttttactcatcggaactattactcacgcattttgtatttgattcttctcaaaagttgaaaaactggggtgaaactttaaaaaaatcttcaaaaaagaagcaaaatagtaaaacaaattcttgaattaaaaaaatcagtttctatttttgaggtgatacccttttcttgaaaaatttttgagtgttttaattaattataatttgaaatgaatgtttccctaaatttaatgggagacattcattttattttatctttaattcgtttgtaattgtaataataaatataatttgcaattgctttgtgaaattgtttaaaagttaaaaattctttttcgcgacaataaaaacattctctttttaatgttccaaaaaacgattcaataacgctattatctaaacaatttccttttcgagacattgactgaattattcctttttgttttaatttttctgaaaattgtctatgttaatattgtcaaccttgatcaatgtgaaaaattaaaccttcaagatttttgtgtttgaaaaaagctctttgaagcatttttctaatttgctggttattagcgcttgtagacaaatctcaagcaataacttcgccattaaacatatctaaaattggcgataaatatgctttccaaatggtccgctaaattcagttacatctgtagttcatttttgatttggttgagtaacaacaaaatttctatttaaaatattgtctgcaattttgccaactgttcctttgtaagatttgtattttcttctagaacaaattgctttgagattgaattttttcattaatctgcgaacttttttaagtccaattttatagtctctattattaagttcagcttttattcttctttttccatatcttgctttattttcttcaaaaataagcttcatttggcttataatttcttcatttttcttgtcaaaatcttcttttttgaattcataataaaaagtagatataggaatagaaaactcttttaatacttgagttaatcgcaggtttttatcagcttttactctattataaattttttttattttttcttgccttggttgatttgagtcaaagatctctaccaaggcttttcacttttttagcacttcgatttccttttttaaaagtttattttcttctctaagaagtttaagttcttcatatacagataatgaaaaatttgattgatcttgactatcggaattgtttgatacttttgtagatttattattacgaatcttagttttcattatcaatcaccctttgtttaattctaaaccactaattgccgattctaaatattttttcgcacaaaaagatattagacttagattaagattattttcaagtgaaattttaacaattggttcatctgctaaaaatcttttaaccaagtttaatctttgatctatagtccactttttatttcgtggttttttcttaagaccttcaactcctaatttgtcataaattttttctcaaaaatttacttgatttaaaaaatttttctgacttgttttagcaaaatcaggctttttaatttcaattccttttttgtatttttttacacattctaatttaaattctaatgaatatttcataaaaaatccccttttctatttttctaggaaaaggggatctgctgattttagaagctgatttttttaatcattaatctcttggaattcttgaaaaattaaaagaatttatatcaaagtatgattatagtattattcatttagttcattatgttgattatcttgataaaaaataagaattaattttgtagaatttgaaagttttataagcgcaattattacgaatataaatccaacaaatgttcaaataaaaataatccctcaaattaaactataataagaaaatgtacatctttttgtatgttataaagtattaaagtttgttcatcattatttctcgaagcaatatacatttcaagcaagttaagtattttttatcattatattattaatatctactgtttctctttctagaattttttctattagcaagtactctgttattttgtggatatccattgttttgttggtaaccattattttgagagtagttattgttttggtaataatcataagaatcatcgtcatattgaaagtcatagtaatcttgttgataattgttcattgttgctgtttactgaggtgaaaattgtatcattgacaaagtttttgcagcagaagaagctttaaataaagagactaaaaccaaaataccaaaaagtgtcaaaaaagctccaaagaaagggattcacataaatataaacatttttgaagcaaaatttatttttctatatgcatcatacaacataaaagatgaactagaattttgtgaattcataactaatgggtatatgagattttttaaagaaattgttctaactgtgagtacaatagcagtaattaatcctacaaaaccgatagccaaggcaaatacaaaaacgcttgtaaatttagcttcaaatagagaactagaattatatgacatcgagtcatcagttactaacgaatatctatctcttctacttaaactactaatatattcttttacaacaggtaatgaaagtgtaacaaataaaacactaacgattatagataaaaatcacaagattcaaataaatctaatagtatttttaagtgctttagcttttaaaaaaataagtgattgaagattcataatattcatatcatatataaattgcaaaatttttagcactttttgtacaaaaagtacattttgtcttgaaaagctctttaataataacaatatttattaaaagctaagtaatataaacacatattcatttgtgtcttattattttaatgtatataagttatgcattataaactgcttcttaaaaagtaataaaaaatccttcaaaaataaaggatttttataatttttttagtaaattcttaccaaaaaaaagaatattgatataaaattttttgcttgtatagattcaactatacatttttatattttaaaaaaggaaaaatatgttaaaaaataaaacaatatttaagcaattattcattagtactattgcgtttgttcctctagtagctttagtttcttgtggagaaacaaaaagtaaaagtggctctgatcaacaaccaaatgttcaagttaatcatttaacaaaagaagaagcgcaaaataaatataatgaaataaatagtgaatttgaaactattaaaaataagcaattaaaagacaatactgatccgcaaattaaaagttctttagactatttattacctagaattaaagaaattttagaaaaagataaatttgattttgtaaaagcacaaacatttttagatgttgtaaaagatagacttgctaaattcaaagctgctattaaagaataaataaaataaaaaaagagcaaaaatgctcttttttaataacttgaattattggtaattttaaattatatggcgcgcctggaaggactcgaaccctcaacctcttgggccgtaaccaaacactctgtccaattgagctacaagcgcatggaggcaccaaccggactcgaaccggtaatcaaggtgttgcagacctatgccttaccatttggctatggtgccattaaagtaataaaattttactataattttcattttgttatagcaaattttactacttttaaatatttattttagattcgaattcttaatttattaattttgtataaattaatttctgctttattttgaaaataatcataacaattatctaaacttgagattaatttagcttttttgtctaaaataattttttggtaaacattttctttgtaatactttagaatttgtaaatatttatccagatttactaaatcaaattctagagtataaactttttcttgttttaaactacagatatttttatttgtacttactaaactagctgcattgtaatatgaacgagttagtaaacttaaaccaagttgtgcattacttttatatcttgcaataataattaaaatattataaagattgtgagtaaaaatcacatcttgaatttttttaccagaacttgattttggttcggtagattcataaaatttactttgattattttctaatctataagcacaaactatgtgtttggcttttgattctttttgttttatttgtgctaaaaaactaccgatttgttgttgagtttctacataaaaaacatagacaaaaaatttagaatcttttacttctaacaagtaattgtcttgatctaaacaacagcttttatacattttttcctttaaaaaatgaagaaaaattagttattttatcaatctcaagtagatgatacataattacaatttataaccacaaaagcaaaagagttttttagatattgattttaatttctacacatacttagttggtaaaaatattgttttatttaaacacaaatgcttaaagcaactgaattagaagcaaaactttttattttaattaaatttaaaatttttaaagaaatattattttaattttagattttagcaaacataaaatttaaagtatcttttaaaatacaaatagcaaaaactgtgaaaaaagaaatgtttttatttttgtggtaatgttttttcaggttcaacaaatctaactttgaagattgaaacatattttggttgatattcttttttaaaggtaatttctatcttgcttacttttgttaatttatccaaaacaaatgttcatttgtgataggtttcagttgtagttgtaaactctttgttagattgagtttgatgttgttgagttgtttttggtgtttttgtagttgcagtaaattctgttggattattaacagttaaatcttttgtttgatcttgaccacgttcatctttataagtaattttaacagtaaagtaagaagtaagatgttgttcggcactatattcattgtgttttctagcgaaaattcaaaattctttcattaacctactatcaagattttgtggatttatggtaaaaacaatatctttaccttcggttttattagcatatcaataagaaaaataactattatcatcagttaatgcaaaacgaggttcaaaaaaggaatcagctgatgttgcagttgcattatatttgtcttttgtatccttaatttcgaccaatttattaagattttttattgtatatgattgttgagttgtagaaccaaagtaagttaatgaataagtaacaggtaatttaccttgcttatcatccacagtaccagaagtaacttgtaaagaagaatttataagtggtttttgctcatcttttatagttgcatttaataattcttttgtaatcatagaaggtagataacttttgtttattgtgtctatactattatctactaattgaacaaaatcagctttagatttaacatctaacgtttgtaaattagttgctaaaatgcttgttttttctttgtctttgtttgtctttgcaaaaatattaagtgatttaagtgtgtattttccactttcatttgcaaaacttggaacttgaacattaaaactcgaagtactatcatcataaacaacattatcaccttgacctgtttcatgatgagtaattattttttcagttgcagtggattgattttgctttgtaaatgaataagttaaacttacatcataattattaaaattatctaaattattttctactttaagattgaatttaccagtttttatatctaaaggtgttgctgataataatttaaaactgattataaaatctaatggtttatctgtggcttttgattttgctatatcaaaataaactaaattatttaaagtttttgaatttgttgcaaaatcaggaatatttctttgaattttaacaatttcatattttgtattaatatctaaattattaagtgttgtttcaacaaatcttccttcattttcatcacttgaatattttgctgatactgtttttactaaatcatttggatcattaacttttttatacgaaatagtaagcggagattttgtttcttcagttttgtaatcatcatcaaaattaaatctaatttttacagaatttagatttgtttgtacaactctaaagttagaaatttcttgtgtgtatataaaggaatcagtaatgttatttttaacgaaatctatatctttgaaaacatctgattctgatttatcaaaaacaaaaattttagataatttataattagtatttttacttaaattagtaaagttaaactcatatcttgaagtatcttctaagattttttgtggttgtgatttaacaactttgccttgatcatctgtatattcaacttgaaggtttctgttgtaaaaattgctaggtaatgaagtaaaagtaatatctaatttgtattttaacttatcattttcaagttctttttgaccaagaagttcaagattaatatctttagttgctgttgtaaaattaaaatctgaatcagcaggtgcagttcaaaagggaacattagctaaaagatcaaagtttttataaggattttctacaaaagcaagactaactaattcgtattttgtatcctcttttaaattattaactctaaaattaagtccataagtttcatcatctttattttcagctactgaataaacactgaagatttttgcattatctgaattaaaattactttctttaaatttagcttcaatttgttggctaggatctaaacttagagctttagatacaaaatcaacattgatagttgctgaagaaattgttaaatctgtagcaaaatccacaggtttttgaacttcgattccatctacatttgaaatcacaagcttgactttttctgttttactttgattgtcagtaattattttgttgagtttgagattcaacatactaaaaagttcgttatcacttaacaaaacttttgcgtttgcatctgcatgcttgctaatttttacttcttgtccttctgaattttgtaaaaaaatattaattgttgcatttttagaaatgtctttatttagcaaaatgctcttgtttttaatatcaagtttacctacacttaagtcaattccgttgctattatcagcttttcaaatgctgttttggttcatatctaaaacttcaactagtctttcatttccagttttgtcttgaattagcaaaacaccattgtgagctcctaaaatttttctattcaagttatttgattcatctttaaaaacagctacatagcttacatctaaattatttttttctaatttaagtcttgcttgaggaattccatcattatcataatttaatttcatagatggactagagatagcattattttctttgataccaaaatatgttccaactgaaacagaagaaacagtaagagttgatactaaagatagtgcaattacgattggttttttcattttttaatacttaaatcctttatttttgaagaaaaaattaataaattatgttttgtaaaaaatacaaacataaaaaaattttttctttatctttatgtgtttttaagtttaattttttgaattataaaaaaatttgatttgcttaagcgaacttatatgcaaataagtgtgtctaatatatctaatttattatactaaaataaaaatatattcaaagacttttttagaaaacaaatctttgaatatattgatttttttaagattttatagctgattttaaatcagaataacgaaattctgaagtaacttcttcaattttatcagtgaaaatagtggtatattcttcttcgacataaacaagtccattatatatatcataaactttttgagtattagatttatcagatccgataaataatttatcagcaactaatgaagcaacaaaaggattttgaccatattggcaacctttgtaaccttctgttgttctaagagttactaaatcagtatctgtttctaagaaaattcccgaaggagtaataatttttaaatgagtaagcttcatttttatagttttttagctttttcaagtgtttcttcaattgttccgatatataaaaatgcttcttctggaatgtcatcatatttacctgataataattcagcaaaacttctaatagtttcctctaattttaaaaatttacctttaattcctgaaaatttttcagcaacaaaaaatggttgtgataaaaagtttctaattcttcttgctcgagcaacaacttttttatcttcctctgataattcatcaacccctaaaattgcaataatgtcttgtaattctttaaatctttgtaatgtttgaataacttgacgagctacattataatgctcttgtccaacaattaaagggtccaaaattcttgaacccgaagctagtggatcaacagctggataaattcctaatgaagcaatatttctatctaaaactgttttagcatctaaatgtgaaaaagttgtagcaggagctgggtcagttaagtcatcagctggaacataaacagcttgtacagaagtaatggaaccgtgttttgttgaagtaattctttcttgtaattgtcccatttctgtagctaatgtaggttgataaccaacagttgaaggaattcttcctaataaagtcgaaacctctgatcctgcttgtgtgaatctaaaaatgttatcaatgaataataaaacatcttgattttcttgatctctaaagtattcagccatagttagagcagaaagtgcaactctcatacgagctccaggaggttcattcatttgtccaaaaactagtgctgttttatctaaaacaccagctgcttccatttcaaaataaagatcatttccttcacgagatctttcccctactccggcaaaaacagataatccaccatgttgtgttgcaacgttgttaattaattcttgtactaaaactgtttttccaactccggctccaccgaaaagaccaatttttcctcctttaacaaaaggaattagtaaatcaataactttaattccagttactaaaatttcagatgaagctttttgatcaacataactaggagctggcgagtgaatttcttttaattgttcaaaaacaggggctggtttttcgtcaattaccttacctaaaacattaaacattctagataaaacttgacgtccaacaggtacttgaatttgttttcctgtatcgattacatcaagacctttgtagagattataagtcatatccattgctatggttcttactgtatcatctccgatatgttgttcgacttcaagggttatttgcttgatttttccatctttatctgctggtaagttaacaactaaagcatttaaaattgcaggcagattcgaagaaggaaaacgcacgtcaataactggaccaagaatttgtattatttttccgatattttctttttgcataattttccttattttagtattgaaccaacaatctctgtaatttcttgagttattgaagcttgtcttgttctgtttaattcaattgataatttgtcaatgatttcatttgcattatctgaagcattttccattgcaattcttcttgaagctatttctgatattttagattcaaataaaaagttattcaaagcagctccaaaataaataggaattaaattttttaaaacactttctggactaggttcaaattcaatttctaattttgaattttgtttaaattcaagcttttgttgttcaatatttttatcaattggaagtaaagtgaagttaattgcattaaaagttaaagtattaataaattgagtataaataatttcaattcctgaaatttgtttattttctaagtatttttcaatttgttctttgactttgaaaataatttctaaacgatctgcacgatcaactacatcaaattcaagatcaatttgatttttgaatttactaagataactaattcctttttttccaataacaataatgcgatcttcttcttttattaaagattttaacttcttaactacattgacattataagctccacaaagcccaagatctgaagtaattactataaaaactcttggttttgcagtatctaggtcaaaaacattaattgaagtagtttttttaataatcgataaaaagatttcgtttagatttgtgaaatattgtgaaacttgaacaaattctcttcgtagtttaggaattttagcatttgaaatcagttccattgctttggtaattttttcagtattttttatttgtaaaaagcgggattttaacttacttaaagcaaccattttactgagctgattttgctgtaaatctttctataaaactttgaaatacttgaattagtgcatcatagtttttattatcaagtgctttatgatctaaaaaatactgtttttgttttaatatgaattcatttttgtttaaaaattcaaaaaattcagttctaaattgatttgtttcatccggtttaatagagtctaacaatttttctttaataacaagtaaaatcataacttgattaaactgagttagatgttcatattggttttgttttaaaagttcgtaaattttggttccacgatctaaaagtcgttgtgaagattcaccaagatctgatccaaattgcgcaaatgctttaatttcattgtactgtgcaagttgtaattttaatgaacttgaagcttgtttcattgcttttgtttgtgctgatgaaccaacacgactaactgaaaaaccaacatcaatagcaggtttttgtcctgaattaaatagtgaatcacgcataaaaatttgcccatcagtaattgaaatcacatttgttggaatataagcagaaatatctcctgcttgagtttcaacaataggtagtgctgtaattgaaccaccacctctttcttcgctaagttgagaagctctttctaacaaatatgaatgttggtagaaaatatctccagggaaagcttcacgaccaggtggacggcgaagaagaagtgaaagtgttctataagcaatagcgtgctttgtcaaatcatcataaataattaaaacatcgtttccgttatacattcactcttctgcaatagaaacacccacatatggtgctatgtattgaagtggagctagttctgaagctgaagcaacaacaactgtggtgtactccattgctccttcttttttgagtttgcttacaatttgagcaatagttgagtttttttgtccaatcgctacataaacacaacgaatatttttgtatttctgatttaggattgtatcaattgcaattgcagtttttccagtttgacgatccccgataattaactctctttgtccaagaccaataggaactaaagagtcaatagctaaaataccagtattaagtggtctatcaatagctttacgagacataattgaaggtgcttcggagaacacttctcttctttttgtgaaggaaatatcaccatttccatcgattggttcacctaaagcatttactactcttgataacattccatcacctactggagtagaaattgttaggtttgttcttcttacctcatcaccttcaacaactgcattttcattacccataataactacaccaacgtagtctttttctagattaagtgctattccgtaagtgttgtttttaaatgcaactaattcacctaattttactttgtcaattccataaactattgcaacaccatcacctactgtaattacttttcctgtttctgcaattacattttttttgttataagtttcaatttggtgtttgattatagcagaaatatcacttgcttttaatggcataaaaatcctttattattttaatatatcacttgtcatttgactcaaaagtgaagctacactgttttcaaaaacataattgtctacaactattttaattcctgctaataaatttttatctatacgatgttctaaaataatttgtttattgagtttttgagttagtaaattaacaattttgtgtatttgattagtgtgcattggaaaacttgaataaataattccacgagctatttgagaaagtttatctgcaccttttgtaaatcttttaaaaatcttttctcaataaaaaattaagtttttgtcaatgagaatttttaaaaaatttaaaacaggttctgaaagtcttttagcaaaaacagcatcaagtatttcatgtctttgtgctttagaattaaaatgagattttaaaaaaattaacaatgattgattatgaagcaaaacattttgaacgtgaaaaaattcttcttgaaattctttaactttttttatatcctgagcatactcaagcatagaatcagcgtaggctaaagcgtttgtattattttccatatttaaatttatttattaaaattttctagttcaatttctttgaataaatcatcaattaatcgttgttcatcttgataagtgatgtttttttctaaaatttttgaagctaacactgtagcggtagaaattatttctttttttgtttcttgttctgctttttgttttagttgaagaatatagaattttccttcttcaactattctttttgattcagcttttgcattgtttgtataggtagttgctatgttagcagcttgtgtttttgcttttgcaataatttcttgtcttgttaattttgcttctaaaagttctttatttttttcttctacaagttgtactgatttttctttattttctatagtagtgtcaatattttcttgtaagaattttcttcttttttcaatactttttttcaaaggattgtataaaaattttgaaaggataataaacaatatagcaaaggacaagacagttgctaacataatatatggatttggaaataatcctttaaatagattctcaacctctttacctaattcactttgtgatgcaaaatttgtagcgttttgtaaaatcataatttaataaagtctttgtatttgttcaaaattaagcaaaaacgaattgtaataaaatagaaataactagtgaataaatagcagaagtttctgaaatagctgcacctataatcataaatttgaaaactgttttttcagattctggatttctaccaacggattcgatagcttttgatgcagaaaatccttgaccaactccagcaccaattccacctatcatagctaaccctgctccaacaccaactaatcctctaccaattgattctgttaaagctggttgagcttgtgtaactgtttttgcagtttcttcagcaaatgtactaattttttgtaataaagttacaatgtgatctgtattcattatattaattgtccttacatattagatttaagtttttcttgataaaacttagaaaaattttattacttactctttaaaatgtgaataaaaaatttcccttttatgcatttgcttttttaaaagggagtcttcaactttttcttttttttaggttttacttcttcttctatttctgcagatcaataacttattgttaaaacagtaaaaataaatgattgaactaatgaaccaaaaatgtcaaaatagaaaataaatggtggataaataataattgctggtacgtttaaaactccaattgcattggaaggaattaagtgtcaaacataagatagtccatgatacatcactaacaaaatagctgaaccacctataatgttcccaaacaacctaaaagataaagaaatcaaaggagcaggcgctgatagtgcgtttaatggattaacaatatattttttaatataagctaatttattaaaaataaacccaacaacaaaaatacctgttcatgaaattataccaagtgttaatgtaactgataaactagaagcaattgtttcaaaaccaaagactgaaagtagattaccaaatgctaaaaaagtgaatagagtaaaaaaatatcttttcatcacatttagttttccttctgaaatatcttctactaaattgtctataaaaagaaagtaatcttctgcaagtaacacaattgtaggaggtactttatcaactttcacttttttaatttgaaaataaattaccaaagaaagtactaaaactaaaaaaattaaaatacacattgtaaaaagctgtggttgatttcaatttaataaaaatttactagtgtctaacattttctctcctttctttttttaattttttttcactcacttacaataatcgaaattggaaaaagagtaattcctactaaaaatgtaaacaaattaattggtcttgatattttttgtagtggtgtttttatcacattagctggaaaatgaacgttaatcactattaaaattactataaaaacaatatgaactaatatcaatatgtaaaataaactaatagcaactgcaactttcttatattttttttgcgttttttttactttaattaatattttatattcaaaaattcaagttaaaaagattgaagataaaacactaattaaagaaaaaaatcaaccaacaattaaatgataagatcaaaaaacacaaatagcaaatacaaatacaccaattaaaaaaaacattaaatatgttttggttacacttttgtaaaactcatattttttcatcttgaagctcaatgagcaataatattttattccttttgcaaaaattagaaaatttttttattaaagtcattgattttttggccaatttcaaaatcagcaagcgatctaacttgcacgtcttgaaattgttgattcactttatttattatctttttaactttattatttgtttgtgatttactaatttttgcttcattttgttgtatgtttaaaaaagtaattcccattattcaaatatcttcaaaattatttattttgtctaaaaaaggaataatttgttgataaataaaatttgcatcatcgctaaaatgttctaatttatgattaattttaatgttttgagaatttcttgttttataaaaaagttgaattttatttgtgtgtaaatattttttctttagtttttcacatagatcaaaaataaattgttttattaagctgtaaagtgttttaaagttcaaaatttcttcttttttaaaggtttttgtatgagaaagtgatttgatttggtgacttaattcaatttcatcatcacctttttttagtaaattatcaaaaaaataaaatcttcttgtacctaagattttaattagtctttcatcttcaatattagtttttaaaaaatctgaaattgtgttgatattttctttttttagttggtaggataaagattttccaataccaaacatattagcaatatctaaatcaaaaagtgcttcttttttgttcttcttgttgattaatttaaaagaaactccttcttttttagctaaatttgttgccatttttgctaaaaatttattataagaaataccaattgtaattggcaattttaaatgttttcaaatctggttttttatatcatttagcatagtttctaaactatgaaaataacgataataatcacttagatccacaaagcactcatcaattgaaaaaacttctaattttcttgaaatattttgcctaataaaagcaaaaaattctttggataaaaaagaataataaatatgatctggttcaattataattaaattaggaatctttttttgaatattaaaaagtttatctggtgtttttgctcctagtttttttgctgttttagataacgaaacagcaatagaatttgcttcttttcttgctattgctattggtttgttttttaaactaggaactagtttttcttctgctgaagcgaaaaaattattaatatctatgtgtgcgatgattttcatttttgttcttttattatatcttttcaaaaagaaaaaatagacaatttggttgtctattttttaactttagattcaactaagtcgattacatcttttacagtttttgcttttaatagctcttcatcggttatttcaatattatatttttcttctaattcagttattaattctacaaaatccaaagaatctaaaccaattgaatagatatcagaatcatcatgtatgcttttattagaataactttttaatttatcataaattagttttttcatatgttaattatatattatctttttttaatttaaaatgataattttgtgaaacagattcatcttcgtgatatcaaataaattcaataaaaatttctttatcagctttgattttgtaattgaattttatatctccgtaatttactaacagttttgttattatgtctcttacaaatgttgtaatgagtttttcaccaattttagcgtgcccattttcgatttcaattaaatcgtaataatcactagcataaacggtaggaaaaatatctttagcttctaatttagaattaacaaataaattatcatcatctagagaattttgagtattttgtttatttttgaggacaaaaaatgttgttaatgaggaaattattgcaagcgaagtaaatacacataaagtgatgattattgcttttttatttagtctgaacttcatcttcattttcagaaagttcttctttttcttctttaaaataaagactttttagaatttctaagcttatttcatttgaagaaatatacttaaaatttttattctctaaaatgataaattgatccggatctaaaaaagaatctttgtatgttgaaatttctaattttaaaagtccttctgttttatctagtaatttttgtttaatttcttgtctatgagctaaggaaatatcaggataatctgcatttaaaaataaagttgaaatgggatttaagtaaccactaaaattgtatggaattaaaaaaccttgcttcgattcgttttgaataccttttacaactatttttttctcagaatcataatatgtattatttgcaattacaatatctccaatgattttcttacctaaaacatattctatattgttcttctcacgaagtacaaaattaagatctaaactttcatttttatctattggtaaattagttagttttttaggtaaaattgataaatcacgatctaatgtattttcatcataaatatcattttcaactgctactttgtatacaattttattatgttgtcctacttctcatttgactggaaaaaaataaatattgttataaaattgtttttcatactgagaatcaaatattgagctatttttagttgcaaaagatgcaaaatttaatgttttaattgatttaaatacaattccttgcgaattgataaaaaagtcttttttaaaaactggatttttagagaatttgatttgacttaaaatggctaaattttccttgttatttctatttatatttgaaacaattgacattgaatttaattttgaaaaattaaatttatcaagtgcaacaaaaggaaaaatactttcagcaaaattttctccaaaaatctttaaattattgacaatttcagtatctttattgttaatttgcaatctcgaaatcaaatctatattatttcttgaaaaataagtaactttaacagaaaatgtatcagatttgatattacgatttatttcaatatattgtctatcatctgcaccagcaaaatatgtaaatcttgttatgttttcgagtttagaatatatatttacagattgaattttttcttcaacctgaacactatgattaatgctaaccatataaaaaatacagaaattgatctattgcttgatgaacttttttataataagttgttttagatcagtaattatcttttcaatttttatctgtttctaaaaattctttttgcaaaataattacatgatgaggatctaataatttcaaaattctttctatagtagataattcagacatttctttttctaaattaactaatgcattatctgttttggactgattttcaagctttagtttgtcatcagtttttaaaaactggtattttttgtgcatatgaaagatttttttcattatatcttttttctctacaaaagaaagtttccttaatctgtctatggctgtctcctttcacataaaattttgttaaaaaaggcagcaaaatccctaaaaaagtaataatttaggatttttaatgtaaaagttcctatttatttactaatttgaagtcttaaaatataattgaggatttactaaatattctcatttcaaacaaaaacatagtcatatactctaactgtatctccagttttgatgtttttattaatcaattcttgtcatacccctaaatatttgagtttgttgttaaatcttaataaattatcatgagaatttaaaggaatttttaaaaatatctttttaatttcatcaccaaaaatattaaaaacatttcctggtaagatttcgattttgaatggaggatttaatttaatttctacttctttaattgtgctttcataaacttgctcttgagcattttcaacaacttttaaaagttcttgttttaacaagtgaatattatgtttttcaagtgctgaaatttcaacaactttaagcttaggatagatttttttaaactctgttaaatgcttgttaaatgaaggtaaatcgtttttatttgctactataacttgttgcacatttttaagtttttcattgaatttaaaaagttcattattgattaattcaaaatcagaaattggatttttatcttctgatccaaaatcaataatatgtgcaatggctttacatctttcaatgtgctttaaaaaaacaaaaccaagtccttttcctaatgaagcaccagcaattaaaccaggcaaatcagctgctacaaaagatttatcataatattttacaagtcctaattgtggcaccaatgttgtgaattcataatcagcaattttaggttttgcattagaaattgcttctaaaactgttgatttaccagctgaaggttttccaacaaatccaacatcagctaaaacttttaagtttaatgttaaattaaaactttggcctaaatcaccattttcactaattcttggtgctttgtttttagaagatttaaacttagtatttcctcgtccacctcttccgccttttgcaactaaataaggtttttcttctacaacgtcgcaaattaattttttgtcatcaaaaactaatgtacctagtggaactttaacaaaaatgtcttcaccttttgcaccatatctgtttttactttttccgttttcgccatcatttccttttattatttgttcattatgaagactcaaaagtgtatttaaaccagaatcacctacaaaaaaaatagaacctccgtctccaccgtctccaccgtcggggccacctctgtcaacatgtgcttctcttctaaaggaaataactccatctccgccttttccagcggctatttttatttttacttgatctataaatttcattttatctctttttatattgttctaattcttttattaattcttcaactcttttagccaaaggtgcatcagggaaaactttgcttggttgcgcatttactcataaaattgcaaaataatttactaaaatcttgtgttgaatcaaatattcataaacataatcatcataatgttctaaaaatttatcttctagttctggacttaatttagctgattctataaaataagctaaatcaaaatgtctatcaccttttgaagcatattctcaatctacaaaataaatttttccttgagaatcaagaatatttttaggtcataagtcattgtgcaaaggagttaatttatccatttgtgctagtattttcattatgtgtctaaaatacttatttacaattggtaaacacatttttttgttattaatttcttttatataatttttaactctagctgcgtgatttgaagcaggaaaatccagttttgaagtatgtaattgcttcaaatttgaagctatttgaattacatttttttcatcaatttcaagattttgatttggaattcaacttcaagtgagttgagtttggctttctgaaattaactttggcacaaagtcaaatttttctaaaattttataattaattttgtgattaaaaccagtaaaatgtttttgttgaacgaatttatcaccatctctaaaagatgtatttgtatgaccatttttgatttgtttcataaatataattttatttaattttactaaaactaaaaacaaatatttgataattttagctcattattagtaaaatttcttcaatttttcctaaatttttttattttttgagtttttacaaaaaaaactgcaaatctaagtgaaaggacaatatgaaagacaacaaagaattaaaacaagcttttttagaaattgaaaaaaaatttggaaaagaagcaattatgcttttaggtgaaaaacctgatactgacacagaagtattttcaactggttcacttgccattgataatgctttaggtatcggcggatttcctaaaggaagaattattgaaatttttggacctgaatcttcaggaaaaactactattactttacatgcgattgcagaagtacaaaaaaatggtggagtagcagcttttatcgatgctgagcactcaattgatccacaatatgcaaggaatttaggtattgatattgataacttaatcttgtctcaaccagattcaggagaacaagctttagatattgttgatactttagttaaaacaggtgcaattgatctaatagttgtagattcagtagcagctttggttccattagcagaattaaatggagaaatgaaggatcaagtagtaggagcacaaccaagattaatgtcaaaagcactaagaaaaatcacaggttcacttaataaaaatggaacaacaatcatcttcattaatcaaattagagaaaaagttggggttctttttggcaatcctgaaactactccaggtggaagagcacttaaattttattcatccattagacttgatgtaagaaaaaatcaacaaatctcaactggttcagacataattggcaatatggtcaaaataaaagttgttaaaaacaaattagcaattccttttaaaactgcaaacgtggaaattgtttttgctcaaggaatttcaaaatttgctgaaattgctcaacttgctgaagaatatggaattgtaagtaaaaaaggtgcttgatattcctacaatgatcaaaacattgctcaaggaaaaactaattttagattgttacttgagaacaataattctctttatgaagaactaagagcgcttgttaaagaaaaactaaaaaattcagaataaatactttaaaaataaagcaaatgaaaaataaaagaagagaaatttagtaaaattattaaatgaaaaaagttaagaagtttaatttttgaatcttattatattatgtttctttatttctaattctggccttattaagttgtttaatttatctttcttacttatcatttaagaatgatttcaacttagaagctgcaattatcattgtatttatttatcttacaaatttaatttctaacatttatttagcttttcaaaatagacattttgaagcaaaaataccttgaataattgttttttcggttttaccttatatagggcaaattttgtatgtaatttttggaagaagatatttttatcgaacaacttctaaacaatatttaaaagaatataaaaattttactcgtttaaataaaaatcaaaatgactcatttttagaaggtttaccttcacaacaaagacaattattagaattttctagagacatttttaattcaccaattcataaatttaaaactcaactaatttctgatggacatcaattttttcaacaaattttccaagatattaaaaatgctcaaaaatttatttttattgatacatacataattaaaaatgattttatttgaaaacaactaaaaactttacttattgaaaaagcaaaacaaggaataaagattaggatgattttggactcttttggaatcttaagagtaaattcaaaagattgaatagagttaagaaaaaacaaaatacaaataattttctataacaaaatttttcttccttttttcagcgccaattccttttatagaaatcacaaaaaaatttatttaattgatggtgaaaaagtttatatcggaggaaacaatatttcagaagaatatgcaggattttctgtggattatggatattgaatggatgtaaacttaaaaattcaaggaaaaatggttcaaaatttttgctataactttttatttaattgaaataactgaagttatagcaagaagaaaaaggctgatttatccatttgtaaagtagatttttctaaagtggaaaacgaaaatagcttagtaaatgaagaaaatattggaacaattattgaaagtggtcctgttactaatgaatcaataatagaaggtttgatacttaaacaaatttattttgcaaaaaagaaaattcagattttttcaccttatttttctccaacccataaaatcatttctgctcttaaacaagttattttagctggaattaaagttgagatttacattccaggaagaaatgataaaaaattcattggaattattaatagtttttttgccaaagagcttcaaaacgaaggagcaaaagtcttctttttcaaaaatattttctttcatggtaaatctttaataattgatgaatccattggaattattgggactttaaactttgatactcgttctttatattcacaatatgaagtaaatgtgttctttactggacaaacaattgatagttttctaaactacattgacaaatacaaaaaattagaaattatccaacgtaaaaagataaataaaaaatactcttgatttataaaaatgattattttgttttttaaaccaatgatttaaaaagccattactatttattaagttttggtttttttgtctttaattaaaacaaatgctaaaatttgcttacgctttgaaaggaaaacaaaaatgaaaaaaattaaatttttaactttaggagctttagctactgttactccagtagctatgttaatctcttgtcaatccactgttcaagaaactgcttcacaaactactgaaagtaaaacttcagattttaattctccagaatcagtaatttataatcaaagatgattatcaaatgtttgaaatacagtaagtgcagaaaaaactgcaatgagccaaaatttatataatgcggctaaaaaacaatttgatgctatgataactcaaagtcaattcgatacaaaaaaagttcacatttatgatgataaagttgtagtagataatccagatgaaaacaaagcaattcctgttgtttttatggatattgatgaaactgttttaaataactatgcatttcaaaattatttagttttaaacaataaaacctttgatcctgtattatgaaatcaatttgttcaagatgaaaaagcaatagaaattaaaggtgcttttgattttataaactatgtctgaaaaaatggtggagttgttatgtttaactcaaacagagaacaagaaaatcaaaaaatagcaactttaaataacttagtaaaggaaggtttaaacaaaaaattccttccagattgagtttgatgaatgcaaggtgtggatttaagccaaaatgatccttgaaatcatattaaaaaagataataatggcaagagagttaaaactgataaagaagaaagaatgaactttttaaatgaaagaactcaaggatttaatttatcttcttataataattctggaaataaagtagttttcaaaactgttatgagagtaggggacaactacaatgattttaacgacacagcagttggttctaaattaaatcctgatagaaacaaattactaaatgataatttaaaattatttggaaattttgacacttcagtaaaaggtgtgaaatacatcaaaacaacagataatcaagttaaaaaagaaaatgaaacttgatcagaatcatatattttaattggtggtaattcttcctatggtggttttgaatctgctttagcttctcattactacacactagataaagcacaacaagcaagagctttaaaagaagctctagaaacactttcatgaacaccaaaacaaacaacaaattagttgattttgcttcatttttaaagcaagaacaagacaaagaatattttaaaaatataaacaaacaactaaacttagaatataaaaattatcaaatttatccacaaaaagaagatttatttaaatccattaaactttgtgatttcaataatctaaaagttgttattgttggccaagatccttatcatggtgcaaatcaagctgatggtcttgcgttttcaactaaaaacaaaattcttcctccttctttaaaaaacatttttaaagaaattaaaaaagattatccatcatttaataaacaagatggaaacttagaaaattgagcaaaacaaggaattttgcttcaaaatgtagtactttctgtaagggaatcacaaccatctagtcattattttttaaactgagatattttttcactaaatctttttaagttcatttgccaacacaaaaaagacattgtttttattcttttaggtaaaaaagcacaaagtattgctgaacaattagatttaagcaaacaaaaagtttttaatttatctcatccttcaccgtttagctatagaattagctttgaaaattctcaaatttttaaaaaaataaatatttttttactttcaataaacaaagaagttataaattgaaatgtataaaattttgctataatttttactaattttttcaaaaggaactacattatggcaagagggaacaagaaaaaaatacctacaaaaacaaagaaaatgctatgaagtttagcaagtgttgtaataatcttattactatcagtaggactttcttattttagtaaacatttactttcaaatcaaggcaaaactacaataactacacaagctacaacttcaacaaaaacaacaaatgatgttaatgcaataaaagtgggattttgaaacatattaaactatgatgataacccaacaaaagattcaaaaaaagctcaacaaattaatcttgctaaagttataagtagtcaaaatgctgatttaatggctttagtcgaagtaaatgcaggtagtgataaaaatccaaatagcgttgagaacttaaccaaagaactaaatttaataactgctaataacaaagaaaaagattataaatcaataacttctgacgttatttttggtaaaggaaatgaagcagcaaaagaaagagtttcatttatttacaatgcaaatgttttagatattttagaaattaataaagacaaactatatggttcaaatccttatttaattccttatgataataaaagttttgactccataccagcattttttagtaacggacaagtagattcaaaacaaaaacctatttttgcaaaaaacaaaacaactaaaaaaatagattttgctcgcccaccagttgcagctaaatttaaaatcaaaaaaactgacttagaaaatgataaatctcaatttgttattgttacttcgcattttgatgcccctggagtcaatagcaatccagctcaagaaggaaaagaagaaggaaaagttgattcaaaagatggttatgattcaacaaatggttcacaagaaatttctgaagcaaatcatatgttagaagttatgaattgatttgaaaacaaaacaaatacaaaaaatctcttctttatggcagatacaaacattaaagccaaatcaagtgataaagcttttgaaaatttactaaaatcttataaattattaattgataaatccgataatacttctttgggcgaaaaatttggaacttattctaattcttatgacaaaatttttgaaaataaacaagcaaaaattgaagttacaaatgttgataaatatcctctttgagatgttatcaaagattcaataatttctcaaagtgatttaagtgctacttatcaaaaagaaaaaagcaaaaataaaacacaaacaaattttgatataagagataaaataagaaattatgtttctgatcattcccctgtatttttagatattattcttagcaaacaataattaaaaaaataaataaaaaatcagaaaatttcttcagattttctggttttttcttctttttcaagcttttttagcttttttatttgattaaagttttaaaacataactatgtagaattaaaataaaattacaatattttgttataattttttctaattattttaatgactaaaaaggagaataatggcaaacaaattagataaaatttatgataaattaaaagtttatacagaaattgaaggaatgtctagatacgaagatgatgttgtagcaaaacttaaagaaaatacacaacatctaaatgttgaatacgaaagagatggtttgggttctttaattattaaacaaaaaggtgaagcaaaaggaccaaaaattattttagcagctcacatggatgaagttggatttcaagttttagatattttaaaatcaggtcaaattaaaataaaaccagtaggtggtgtttgaggaaatgcatttattggagctaaagttaaattaattacttccactgataaaatattctacggtgtagttgggcatacatcagttcacattatggaaagagaaacactatctaaagctattttaaacaaagatttatttatggattttggatttgtttcagatgaagatgcaaaaaataatggtgtagagccaggagatagaatttacttaagtaatgaaacatttagattctcaaatcctgatttagttgctggtaaggcaattgataacagagctggtgttgttgttattgatgaattagtaaatcgtctagcaaataaaaaattaccaaatactccttattttgtaggaacagttcaagaagaagttggatgtagaggagctaaaacaattgcttcaaaaatcaaggcagatatagcttttgcaattgatactggagcttcacatgatacagaaggagcaatagtaggaattcctaaattaggtgcaggggtggctatcgatattgctgatggcggaactatgatggacccaaaattagtaaattatttatttaaattagctaaagaaaaaaatattcctatttataaatatctttctcaaggcggaggaacagatgctgaagaattacaatattcaaacgcagggactccaacaattagtatctcaatccctcaacgttatctacactcaacatatggagttattagtttaaaagatatttcatcaattattgacttaatggaagaatttattttagcctttacacaagaagattttgaaaaaataagctacaaataatatataatttaatttggaaaaacactaagaatacttagtgtttttgtttgcttataggttaaattgaaaaaggtttagaagttatggtagaaaaacagttaaaaaagattaaagtagttgaattgttcgcaggagttggtggttttagattaggttttgaaagaacttcgaaattatttaaaactatttgagcaaatcaatgagaacctaacaaaacaaaacaatgagcatttgactgctacacaaaacacttcggaaatagcgataatcatgtaaacgaagatatagcaaatgtaattgatcaagtcccagaacatgatttactagttggtggttttccttgtcaagattattcggtagctagaacaaaagctgaaggaattaaaggaaaaaaaggtgttttatgatgaagtattttaaaaattattcaaaaaagacatcctaattttattcttctagaaaatgttgatagacttattaaatcaccagcgaatcaaagaggtagagactttggaataatgttaaaaagcttggacaatgaaggatataatgttgaatgaagaattattgatgcttcagactatggttttgtacaaagaagaaaaagagtttttatatttgcttataaaaaagaattaactcaaatcattaataaagaacaaaatcaagaaaatatccttataaaagatgggttttttgcatctgagtttttagtcgaatctcaatgtaaaaaaactaacaaatctgacattttgaaaaattactctaatttagttgatgtttctaataatttttcttttagtttctataattctggttcaatgattaatggaaatattttgactttagatttagttgctaaatcaactaaaaaaccttcatttttaaaggatgttatcgaaaaagaagaagtggattctaagttttttattaacgataattatcaaaaattttcttatttaaaaggagctaaaaaaatagaaagaacaaaaccaaatggaaaaaaatatacttactcagaaggaactatgatttttcctgatgacttaaacaaacctgctagaacaatgttaactagtgaaggttctgtaaacagaagtactcatgtaattgaagattatgtaacaaaaaatctaagaatactaactccattagaaactgaaagaataaacggttttgatgataattggactaacactggaatgccagaaagatttagatatttttgtatgggcaatgctttaattgttcctgttattaaaaaaattgctaaacaaattttaaaaatatgaaacaaagtaaattaataatttcacctcctaaaacaatggaagaattaaaacaaagaactgacaagactttaggagttttatttttagaaattgatataaacaaacaattaaatgaaggaaaaggaagtattggaacatttatagaagaacgagtttttggacaaaaacctcacaatgatcattttcccgattttaaagatttgaatatagaactcaaagtcacaccttatataaaaaaatcaaaaaataatcacttcgtttacaaagctaaagaaagacttgtttgtaatatgattgattatagtcaagagtacaaatataataattttgaacaaagttctttttataaaaagtgttcaaacttactgttattattttatgagcataaacccaatgttctaaaaagccattttaaaatttcttattctgaatttttaacatttaaccgattaatgaagcaaaatcataatttttatattttgctaccagataaagatataaaaattattaaacaagattggcgaaatattattcaaaaaattaaagatggtaaagcagatcaaatttctgaaggtgatacaaactatttaggtgcttgtacaaaagcttcagattcaagtgttagagtcttacaaccattttcgaatattaaggcaaaaccaagagccttttctctcaagcaatcttatatgacttacattttgaataattatgttttaagtaaaaatcaaaacaaaagcgaagaaataatatcaagtaatgatgatttaatgaacaaaacattcgaagacataataattgaaagatttgaaccttattatgaaaaatcagaaatagaattagcaaatttgtttaatatcaacatcaaaaataaaggttttagaagtaaaataatttcttctattttgaaaataaaaagtgatgtaaatttttctgaagaatttcaaaaagcttctattatttctaaagcaataagagtggagcaaaataacaaaataaaagaaagtatatcttttcccaaaatagattttaaaaatttagttaatgaaaattgattggattctgttttctatcaacaaattggtttatcaagatttatgttttgtatttttaaaaaagaaaataaagaatatatttttaaaaaagtaaaattttgaaatatgccaatttccgatttaaatcaagctaagcaagtttgggaacaaactaaagacttaattgttaaaaacaaattaatatttgataatttttctgtaaaaaattttccaaaatcttctgaaaatcctgtttctcatgtcagacctcatgatatagatgcaaaaaaaggaagaacagaactttctaatggaagaaaaattataaattattgtttttgaattaataggaaatatattcaaaatattattaatgaaattttaaaaaattaaattttaaattaaaatagttaataacagatttgtattttataatgcatcaaaaaaggagataaattatgaaaaaagcactaaaaccagagattagatttaaagatttcactgacgattgaatagagggtaaggttgaggagttgttttttatagatacaggtaattctaaacttacaaaacaatatataaaacaaaacttaggaaaatatccagtatattcttcacaaacagaaaataatggaattataggctacataaatacatatgatttcgatggagaattcataacttggactcaggacggaaatgctggaaaagttttttatagaaacggtaggttcaatgcatctaattcaggaattttaactttaaattttccaagtaaatataatttgaaatttttatttttagcattgatatttttagatttaacaaaattacaaattggtggaacagttcctcactttacagcttctatgatgagaaaagttattttcctaatacctaagaataaagtagaacaagaaaaaatttcttcaattttcttcacactggataaaatcataagtctttatgagagaaagatgagtctgctagaaaagcttcaaaaagctttattttccaacatttttgttttaaatgcaaataataaacctttaataagatttaaaagtttttttgaattttgagaaaaaaataatatttctgatttatgtaaaatcaacagaggaaattctaaatatactatcaattacatacaacaaaatgttggtaaattcccagtatattcttctcaaacacaaaatgaaggaattagtggaaatatttcaacatatgattatgatggagaatacattacatgaactatggatggggtaaatgcaggaactgtattttatagaaatggaaaatttaatgtcagttcatctggagttttagcacctaattcaaataaaaatataaacaccaaatttttattttatgtattaaaactaatgaatttaaatcaagaaaatatcggagaaactattcctcatttcacaggttcaatgatgaacaaattggaaattacttttgtaaaaaataaacaagaacaaaacaaaattgcagatttattttcaaatattgattctactcacgcacaactaaagcgtaagttaaatttaataaaaaacatacaaaaatcggtcttaaataagatgtttgtgtaaaaaaatatgatttttcttcaaaaagtactaaattttaaagaaaaaagcccattttttgggcttttttgcttacgctttagttgtgcgtgagttaaatgaactttgtctaaaagtgaagaaatttgttgttgttcttggatttgaggactttttatttttaagtttaaaaatgatttttttgataaattaaatctggaagttcctccattgctttggagaatgattttgtgtcttactgagtgatttctgaacaaaaatgctgaaaaatttggaaataaaaaatctgctttatttaatctataaccaaaacaaaaagaatttaaatatattttttcatttacttcttctgttacagcagaagacattccaacttcttgataagtttctgaagacattgtaaataaaatatctccttttacaatactgttttgtttttcatcagattttataaacactaaagatttttcttttaaatcaatattaaagttattaaaaacatttaaataagtaatgtattttgagtttccgtttgtaaaatctactttagttttcgaatttaaaccagagtataaatatcctttatcttctagtgttcaactttgtcagtcactattaaaacctaaaaatctaatgcttggtttttcttcgttttcctttataaacatattatctagcaatgctttttcaattttctccagtaaacttatttttctctcataaagacttatgattttatccaacgtataaaaaagttgaccaattttttgttgctcggataatgaactaacattaattttataagatttgatatcctctaatcctaagttaggaattgctctgttatagttaacatatttttttgaaatcaaaggtaaaatataaaatgaaaatttataacttaataaatctgaatttttaattgtcattgcacaaacatgtgttgtaagagaaaatttgccatttctgtaaaatacactaccagcatttattcctgcagttgtcaaagtcagatattcaccatcaaaatcaaagatgtctgttttacacattattcctccattttctacttgtgcagaataaactggaaattttcctagccttttttctaaatctattttaaaaatatttttacctttactgatttcaaacaactctccaaccttaccctctattcaagtgtgaaaatcttgtatatttttgtagttattttatgaaaatgaaacataaaatcaaaattttctttattttgacgcatcaagaattaacagaaaatctagtcgtttggaagtaaatttaaaaatttacactttttaaataatgtataatgttattaggattatgagagatagagagagagagcagttttcaacaatttcatttttaactaaactaagatgaatattttttggaaagctgcctttagaaagaaagtataaaccaaaaattcttgaatatctttttatgcttttttctagcatattaatctttatttgtgagttaatcttattaatagtaattcaaaatttacaatatctaaaaaatgaaaatacttttttagtaaatttagttacaaaattaaaaacttttgaagttaggattttaatcacaatcttgattttgtcttgaattgtacagatatttatgtctatacatgttttttttatactttctaaaacagaatttaacaaaacaattgctttaattgctgctatttctggaatatttttaatatcacctattagtctaattttctctctgatggcatatcaaaaaaatcttctcgcctttgaataaataatccaaaaaatttattatgaggaataatttatgaaaaaaaataaatttttactttttagccctatggttttaggatttgcttcattagtcacattaatttcttgtggtcaaagcgataaaattagtgaacaaaaagatatttatgtagctgttgatggagttcaaacaaaattttatgaaaaagctattgaactatttaataaaactgaatcctataacaaaggttttcgtattaaaacaattaacaaggacgtttgagctgctttagattttacagttcaaggtcttgatgataaatctgttccagatattttctatgctccacaagatagattaactgactttatgcaaaaaaatgcattagcagatattaacactttttcacctaatttattcaatgacattgccactaaactttctttaagtcaacaacaaaaagaagatatgagagagtttggaaatgttaaagctatatccaaagatggattagatgaagtaacaaaatttgtaggtttaagacacaataaagaaggaattgttatagcttcaaacaaatctgaagaagaaactcgtgaagtatttaaaaacccaagcacagatactttaaaagagttagtagaaaagggtgaaactgttttaagattacaagatttatgatatggtaatggaattttttacggtgggatggaagcttactgaaactcattaactccttcacaaaaagaagcatatggtaaaaatctagacaaatatttagcttcaaaaatcctttatctttcaagtgatgaagcaaacaaagtttcttctggatttattaaaggagataaattccatgaaatttacaaaaaaggtttagaagctgttgtcgatgttctttgacctgtaattgatgcagcatatataatggatgaaagcaagttttcaaagactgtttgatttaaaaaaggtattactcaaagtgatttacaatcattatatgtaaaagatatgggtaacgtttacgcttcagctatgaaattaatgaaagaaaacaaaatttcttattctttaattggaacatgagatgtgcaaaactctgaaatagcaggtggagctaaatcttttttcaacgtaatcaaagtaaatgaaaatgctcaatacaaacaagcaccaggttcttgatcttacatgattaattcaagaaataatggagcttcaaaagatagaaaagatgcaatttctcaatttctaaaaattgtttttgaaatcgatccatattatgaatacttcaaaagcgattccaaagtaccttattcacagcacagacaagatcaagtaaaagaaaaaatcttagaagacaacaagcaagcatttgattctattcataagttagctactgatttaggttatgcagatgcaaaagagcttcaaaatgctacaaataccttcttaaaacctttaattgaatttatgaacacaggagtattttgacctagttgagaaactccaaaaaatctaaataatcctgacgctgatgacaacttaactccaactagcgaaatgaacattgatccaacaaaaagagcaagctttatcaaagctgaaaaatatgatcaattagcttctcaaatgaagccaactttagctcttagaaacacaattgcagttcttctaggattaaaagataactgaagcactcaattagttggaaatggtgagtcttgacaaattggtgcttctaaaatgaaggataatgcctttgcaaaactctctgagcaatacaaagatcaaattgttcaacaacaaccaaaagacaaccttgaaggtactttccatataagaaaagttgaaaaaattatttttggagcaaacggagataataaaacaacagatgttgttgaattactaaaacaaatttctgaagcaattacaaacaatactttagataaattaattgcagatgttgtagctagagctaaagaattttcaaaagaaacagcaaaagtagcagtttctgatcaagaaattgaaaaagcagcaaaactctacttccaaaactacataaacgcagctagaataacaaaactagtacaagatgaattacaaaacaacaacatgcctaaaaaagatggaacaccttcaaattacaaaggccaagttgtaattaataaattagaacaatatgacaaattattaagttttgacaaaatcctaaacgttattacttcaactaaaacattagatcaaggtggagttggaattttacaaactcaaccatctcgttttgactcatctaatccacaatttgcctttgtatgaggtagatgaaatgatcaagttttaggaaatgttgaatgatacaaacaactaaaaagtcaaaatgtaaatagtgcacaaacatttttaaacgttttagaaaataaattttcagaagtatttacagaattcgctaattctttaaaagacggagcaagtgtatctgttaaattaagtgaataatgtatcccaaatataaaacttatattttcaagtcgcaattttatattttaattagtttattagctcttttggctttggctctagttatttgggttttaatcccttttggttacggaatcaagcaaagtgagctaactaaaaatttaactcaagaacaaatttctactcttgcaatttctcttgcaacaaaaactttaattgcttatcttgcaaacaattttgtattaatttttttcttaatttatcttgttttactacgacataaattaaaagcaggatatgtattctttatttgttgaattttagtttttataaccttgattttccttcctttttatcaaggaacatcattttatacaacatttcaattaggacttggaatattagtttctttaatatctggatctgttgttattagtttaattatatttttagcacagtaccatattcaaagaaaatttaattattatcaatgatacaaaatccacaaaggaaaaagtaaataattatggaaaatttaaagctatacaactgatatggaaaagcttttgatccaattttgcctgagagctcgaatagcctaaaagcttaccaaaagcaaattcaaaacattttcagtagacaagaaatttatattaaatcacaacaaaatcgtgataaagatttgtttttaagagcaagacaaaaactaagtgataatttaaaaagaaatttagcaagtcataaagtggcttataaaaataaaatagctgttttaaaagattcagttaaaaaactttcttttgcaaattcaacaattccacttttaaattttgaacttaaaaaacttaaactcaagctcaaagacacacaaacttatgctaaagattttgtttattcactgtcaaaatctgctgatgaattaaacactaaattagataacattgataatttaaaaataactacaagagctgaagaattagaattatttaaaaaattcacaatttattctattattaaaatttatttacaaaaacatcaagatagggattttgacattagtaaaatcaaaatctttttgcttgaaaatgaaattttattagttgaaaaaattaatacaaatatttctgaatttttcaaatctgtctatgaaaacatagaaaaacaaagactttatctttttaataaaaaacaagaaatttgacaaaaatatcaaaaaacttacaaacttgaaaaagaactttatcaaaaagagaaaaaaagtattattttagaaactcaacaaaaaatactaaatcttgaatataaatttaaaagcaaaattagtgaattaaatgccgaaaatagaaagaaaaaagaagcatcattagcaaaaattgcccaacaaaaagaaagcattttgcaatcagaaaaaataaaccaagagaaaataaataaaacaattgcagaagcaaaagctcaatctaaattactacaagcaaaatataaatcttttaaagctttttacaaacaaagagctacacttcaactttgtaaagatttatatactttcttagttaaaaattcattaaaaataaataaaattgacttttcttttaataacttgtcagctcttgaattaaaacaaaaaaatcaagaaatcttaaaaacactaaatgcctttaaaaatgaagaaaaatcaaacattttagttcaaaattgttttgcaatttttttaagtaaaaccaatatttttcgaaatcaatttgagttttcacttttattaaaatctcaatacaaaaaacttattgcaaaaattaaatctagctatagttatgaaggaaaattcaacttagaagaagcaaaagctctgcaagaaagatttttagattcacgtcttagtagattaaaatatcgttatgaaaaaatctatgcaaaaaccaattatcaacttcttttaaaaagtgatttacttcttcaagaaaaagctcaaaataaacaaacacttgcaaacattaaacaaacttttaaagaaaataaagcttcattaaagcaaaaacttaaagaaaaacacatttctaaaattgcttacaaaaacaaaatctatgaatataaaatagataaaaaagaagcaatagaagaattaaaacttcaatcaaaatctttagctaacaaagaaattttaaaaactttgttttgaagagaactctcagaaataaaagtaaataaaaaactctatgagagcaaaataactgaagctacaaaaagcattccaattgaaactatgaaaaacttaagatgaattagtttaatttttggacttgtttttccaggattagctgaaatttgtttttttagacaatatctcaaaggattgttaatgtcaatattttcaattcttgcttgagttttagtagttccattttcttttggattttactgagataaaatgggaggaattcctggatttagtgatctaggagcttcaaaatacaactcagctcaaggtattttccctgacgctcggctttatttatttggtggagttatttcggttttattaatttgctttgtgattatttactttttagtatcaggacttggagcatatcgagtagctaaacatttagaatatggttctcgtccaagcaaatgatcgcatactaaaagatgattaaacacaagtggatttccttgagttatttcaattctaggttgagttttaatgttatttatagtagcaactccaataattacttctattttaatttctttcacaaactatggatatggtcacgaagcaccagcaaaaacagttgattgagtagggctaaaaatgtgaggttattgatgagaatttagagaaaacaaaatgttcttatctttagcaagagtgttaggttgaacagctatttgaacagtattttcaacatttttaccaataggttttggaatcataattgctgttttaacaaattcttctcgtcttcgttttaaaaagattttccgattaatttatattcttccttgagcaattccagcctttgttactctttcttttttaaaaacagcgtttaaagaaggatctgatgggtacattaacacgattatgcttgctttgggtttgatctcggaacctaaaaattgattaagtgaaataggttcagctcgaattttagtaattgttgtacaaacttgaattgcttatgcttgaatttttatgttagtaactggaaatttacaatccattccaaaaaatatttacgaatcaggttcagttgatggtgcaaaatcaagacaattattttgatatttaacactaccttcgcttcttttatcgatagctccgatgctaattggtcagtttgtcggtgcatttaataacttcacaaccatttcaatttttacaggtggtggaccagcttttactgaaaacactgtctttggtgaagcttcaacagatattattatttcttgagtttataaattaacaactggtgctgcaaactttgaaggaaatcaagcatttgcagctgcacttactacattagctgctgtattttcaatagcaattggtgctcgtggttttattaaatcaatgtcaaggagagattaaaaatgctacaaaaattacttcgtaaacgcttttataaacatgtctttgacggcatcaaaatagaacctaaaaaactagctcctaaacaacttaaattaaatcaatcagatgccaaagcaccaactggtttagaaattatttgattattttttaactatttaatcttgattttttgagcaattattattctttttccaattgtttcgctaattttagctgcttttaatgttaacaatccaagaataatttcaataactccttttaaattcggatttgataactttgcttatttatttaattcaccaagatcactatttggacgctgatatttaaacacaataattattgctactttaacaatgattatttcaactgttgctgtagctttaaatggttatgcttattctagatttaaattcgctggttcacgtcattcgctaactgtgattatgatgttacaaatgattccagcaacaactgctttgatttctttatatttattagttagaatgggaaataacataggaattccttctatatttatgcttgttttaatctattctggtggttcaatagctggtaatacatttatgctcaagtcttatttagatacaatatcgtcagaattagatgattcaggaaaagtggatggatgttctaattgaggtttattttttaaaatcttagtgcctgttattcgtcctgcactgattatggttgctctttgatcttttttaactccatttacagatgttatcttacctaaattcgtactaattgaaaattccgaaaaaacacttgctgtgggactagatatttttatcaacgccgatccaaagcaagtaaatgctggagcttatgcagctggttctattttagcatcactacctgcatttactttatttatgtatttacaaagatacattgtcggtggattaagtgatggagctgtgaaaggataaaatatgattaaaaattttctaaaaaatgtcaaaaatcctataaaaaagaagcaaaatttacaaaatcttgcaagtgaagatcaacttttagactctggttttgaaacaatagatatagataaaatggtttctgaaataggtcaagtttacaactcaaaccaaggtgctgatattaaattagtcaatgtttcaaaaaaatacgaaggtaatgaaaattacactttagaaaatattaatttagaaatcaaatcaggaacattttgtatctttttaggaccatctggctgtggtaaaaccactttattaagaatgattgctggacttaattcaataactaaaggtgatttgttattcaacagcaaaagatataacaatttactacctaacgaaagaaatatagctatggtttttcaatcttatgccttatatccgcatatgaatgtatacaacaacatcgcttttggtttaaaaatagcaaacgaaagaaaagacattattgatagaacagtaaaagacgttgctaaaattttaaaaatagataaatatctgtatcgaaaaccaagagatctatcaggtgggcaaagacaaagagtagcaataggaagagcgatagcaagaaaaccacttgtatttttaatggatgaaccactttctaatttagatgctaaactaagagaaaacatgcgaagagaaattgtaaatattcaccgtatgttaaacaccacaagtatttatgtaactcacgatcaattagaagctatgactatgggtgatcaaattgttgtttttaatgatggcaaaatccaacaaagtggaaaaggtaaagatctttattttagacctgcaaatatctttgttgctaaatttattggctcaccaacaatgaacacttttgatgtcaagttttttgggaaaaaattagtaaattctcttgaagatgtcaacattgaattagattcaaaaacattatctttgttaaaacaacatcaagatttaatagttggatttagaagtgaagatctaaaaattcatcttaatcaaacacctaattctgtacttggcaaaatagcaaatattgaactaattggaaaagatcaattaatcgcggtgagtgtaaataaagacattgaatttatagtaaatgcaccaaacgatcaagaatttgaactatatcaagaagtatgaattgaatttgttgtttcaagaattcatatatttgataaaaaaacagaaaatagaattaactaatgaatcaattcacatattttcactctaaaactaattatcttggtcgtaaaattgttttaacattaatatctttgatgttttttatctcaattttgcttcaaatttctatgtattttgtcttttttaaccgaattcaagctgaatatgattacatagcatctggagaatctgcactttattgaagtgttaacaaaattttaaatgcttcaactacttttcaattaaaagaaattttttgaagtttgaattcactagttatcatatttagttgtattatccttgcttttttaattactatgcaagtacaactgtacagacaaagagcaaatggagataaattatttatttacttatttattttaattccaactgtctttttccttctttttgctatcaacgcacttcaacctggcttggtttttagaggaatatttcgtcaaagaaatggaaatgatgtcttaattaatttaccaattaaagacaaaataaactacagcagttgttgagtttcaatgatttttgcttttattagtattatcttaattatttatgctaaaaaactttttggttttattcaaaaagataaaatattaaacaaacaactcccagatactaaagagcttaaaaacaaaataaaaaatattttaaactctaatcaattaagtaaataataaaaaatgagagattttgagcagatccccttttcctagaaaaatagaaaaggggattttttatgaaatattcattagaatttaaattagaatgtgtaaaaaaatacaaaaaaggaattgaaattaaaaaacctgattttgctaatacaagtcaaaaaaattttttaaatcaagtaaatttttgagaaaaaatttatgacaaattaggagttgaagatcttaagaaaaaaccacgaaataaaaagtgaactatagatcaaagattaaacatagttaaaagatttttagctggcgaacaaattgttaaaatttcacttgaaaataatcttaatccaagtctaatatctttttgagcgaaaaaatatttagaatcgggaattagtggtttagaattaaacaaaggaagaccaataatgaaatctaagattaacaataataataataataaatctacaaaagtatcaaacaattccgatagtcaagatcaatcaaatttttcattatctgtatatgaagaacttaaacttcttagataagaaaataaacttttaaaaaaggaaatcgaagtgctaaaaaagtgaaaagccttggtagagatctttgactcaaatcaaccaaggcaagaaaaaataaaaaaaatttatgatagagtaaaagctgataaaaacctgcgattaactcaagtattaaaagagttttctattcctatatctactttttattatgaattcaaaaaagaagattttgacaagaaaaatgaagaaattataagccaaatgaagcttatttttgaagaaaataaagcaagatatggaaaaagaagaataaaagctgaacttaataatagagactataaaattggacttaaaaaagttcgcagattaatgaaaaaattcaatctcaaaacaatttgttctagaagaaaatacaaatcttacaaaggaacagttggcaaaattgcagacaatattttaaatagaaattttgctgctactcaaccaaatcaaaaatgaactacagatgtaactgaatttagcggaccatttggaaagcatatttatcgccaattttagatatgtttaatggcgaagttattgcttgagatttgtctgcaagcgctaacaaccagcaaattagaaaaatgcttcaaagagcattttcaaaacacaaaaatcttgaaggtttaatttttcacagtgatcaaggttgacagtatcaacatagacaattttcagaaaaattaaaagaaaaaggaataattcagtccatgtctcgaaaaggaaattgtttagataatagcgttattgaatcgttttttggaacattaaaaagagaatgtttttatggtcgcgaaaaagaatttttaacttttaaacaacttcacaaagcaattgcaaattatatttattattacaatcacaaacgaattaaagatagaataaaatgaatgtctcccattaaatttagggaaacattcatttcaaattataattaattaaaacactcaaaaattttttcaagaaaagggattcatatcaaaatgtagtttttttatagtaattagtttgctaattttctaaaaatctttttaagatgttcttctttaatgtcatattcttgtgcatcttttctttcggttattaaataagattgtggtctaaataaatcatttattttttctaatgttgaagcacctttacataagaaattatcagctctttcatttttaggtcaacaaattaatgaagtaaaattcaagttatttttttgcttattgtttaaagaattttcttttgctttttttacatatttttgtgtcatttgaattaaatcttttgttttttcagggcttatgtcattattccctttgcctttaatttctatattaatttggtgttgattgatgcaaacaataaaatcaggataagatttttttacttgtgtttgttcaaagtaatctcaaaatatactttttgaattatttttaaaatttctaaatcaaatgttaatgtccaaattttcatcagcatcatcttctaatcaattagtaaaaaaagcaacaaaatctctttctggttttgaatcaacagaaatttttacttgattttttcctatttttttattatttgaataggcatatttttcgatttcactttttatttctatataattttttaaagaatcttttgaatcattaatgtcaataatttcatattcttcaacaaattcttctggtggagcaataatgtgtttgatatttaaagtaggattagtattttctcaattttttacatttagttctttaatatcatctagtaattcagtcaagatgtaatatttataataattaattgaaattctaatattttcattaattttctgattataaattaattcaatattgtcccacatatcgttagttattagattgttgtgtttttttatcaatgattcattgaaaatttcaagctcaatttgatcgaaaattagtttttcaataaatcttccttcattgatattattttttctagtaatctttaaaaagtcttgatttttcttcctaaacttctcaaatttttcgcaaatttgttcaaattcattggttatcaatttataaactttttctttataattttgatttattttaattatgctagatttatcaatttctccaacaacaaattttttgtttttgtattgatcttttaaataatagattctttcacctaaattttgatcaaactttttactgtttgaataaacaaaaaactcattagctattgaattatttaactcttttctgtgatcttcgttgtaaatttttattggaataggaaaacgcttaattcttccaagtgtttgtttatcaagcgtttctgaagaaacatttcttaactgaactaacatacaagctcttggaatatctcaaccaattgcaggtccaactttaaagattattacatcaacatcactatcttttttagacaaagaatttaagtctgtttttgaaatgtgaccagcaacagtttttgttttttcttctgaaaaatatttagcataacttaaattatatttttccaaaattttaataatttgctttatttctttattaaattcagcttctttttcaagaattttatcttttacttgaataagcatagcaggatttacttttcataaattttttaaattttcatcatcaccaatttgtttgtattgttttttaatattagaaaaagttatacaagcttgttctaataaaaatgaattatctatttcatctgtagattcatgaggaatgtttaaatttatttttttattagcttttagaagttttcaattgtcttcatctaaatctttgtttgttatttcaacaatatcatcattttctttaggtgtagctgtcatcattaattcaaaaacattgtctagttcttttatttttttatcaaatgatttagcatctgctttttcgcttatttttgatgtaccaatatgtgcttcatctctaatgtaaataacatagtaatctgatcttaattcatctataaaagcatctaattttccttcttttacaaagatagttgacttaccaaatgaagaagttccaaaaatgaaaacatctgcttctttagctaaaatattatattcttgatcgcctttagcttctttttgtttcgaaggagattctttatattttatagttgcatttttcattgaatttaaataaaatttgtattgttcaaatttatctaaagtttgtttaggcaattcagcattagaaattgtattgtaaataaaaaccagttttttacctgagtttttatcaaattcttccattatcctatcaataaagtttgcaataataaatgttttgcctgaacctgttggtgccttaaaggtaattgaggctttttgttgactatcaaatgcattttctcatttagctactaataaatcaactgctttggcttgtttttcactaagttccattatttctccttttttactttatttttcttcattttcttctttatatggtcttaaagaagaaagagtttttaatacagaatcatcaaatttttctttatctttattgattccaaaatcttttaaaagttttaaaaatttatcttttaattcttgattggttatattgttatttaacaaagaagtgttgtaagttttagatcaaaatacatttaaacttgtatcaaatgcttcatttttcttgattcattcaaagtctttttgaccttttgtgccttgtcctttattaattctataaagtctttcatatgttacgttttgaccaatattattttcgttattagttactaaaacaaaagaacgatttccgccatcttctttattaagttctaaaaccgcttgtccagttgtacctgaacctgcaaagaaatctaaaactctcatatcttttttatcagaaaataaattaattaaatatttcatcaaaccaacaggtttcgcaaaattaaatgccgttttatcaaataaaacttcagttatttcattagctgattttgttgtgtaaaaaccattacttaatctattgtaatttttatcaattacattattaaatcttcgacctgctacttgagtttctatttcaaaagtttttggattaaattttacaaattgatattgttttctttttgctactcaaaatccttcgttattttttattacctgaataaatccttgttttttaccttctaaatatgttttatatgatcaagtataacgcgcagatttgggtttttttatattggtaaacaacttaaaaaaagtaccatctggagcttctatttcgtaatcaagactttctaaatatttaaaagtagatgcacttgatccatggtgtaaatccactaatctgtaataacctctttcgtcaaagaactcatcttttaaatcaaatcctgaatcagagaaagattgttcattatgttttaagtaattaaaagtttttttgtttttatttttagcataacacaaaatatattcagttattgtatctatagaatattgagaacttgtatttccactaggacctgtttttttcattcaaattaaattcgcaacaaaattttcttcaccaaaaatttcatccattaaaacttttaaataagcttgttcattatcatcgatggatacaaagatgactccgtcttcttttagaagttgttttgctaattttaatctttcgtttaaaagatttaatcatcctgttcttgaaaatttgtcccgatatataaatttatcagcagttatttcatcatcagttaaattatttccatcatctgatgtcttttgtgtgttataaggagggtcaatgtagattaaatcgaagttagaatcctctctctctctctctactcctataaggttctttaaaacatcataattttctccaatgattaaagaattttgtaaattatccttcatttttgaagaagaaaaagataatttttcgtctttttcaagtattgcgatgctttgattattaatttctggtgcttcgtcaaaaacaaacccagttgctactctttgttttaaaaatcttcaaatttgttcaaagtcatctatagaaattttgtcattattttttaaaatttctaaatttagtttaattaattctttttgattttcatttaaagatgatttagaaatttgttctaattcgtttaaatgatcttttaaaatttcttcttttttgttcatttttctccttataaataatttataaagattttagcaaatttcacaaaaaatttatttttcttcattttcttctttatatggtcttaaagaagaaagagtttttaatacagaatcatcaaatttttctttatctttattgattccaaaaacttttaaaagttttaaaaatttatcttttaattcttgattggttatattgttatttaacaaagaagtgttgtaagttttagatcaaaatacatttaaacttgtatcaaatgcttcgtttttcttgattcattcaaagtctttttgaccctttgtgccttgtcctttattaattctataaagtctttcatatgtaacgttttgaccaatattattttcgttattagttactaaaacaaaagaacgacttccgccatcttctttattaagttctaaaactgcttgtccagttgtacctgaacctgcaaagaaatctaggactcttgtgttttctttaggttttaaagaaattaataattttagtaaagaaacaggtttaggaaagtcgaaagcatttgataagattttttctaaatcttttgaaccagttttagtacttatactagaagaaaaaattaaatcctttaacttgtaaacaaattctcttctttttggaaatattttataagaattatcacttgttgttttaactactaaattaaataattctgcttttactttgtttttttctcaccttcataccccttgtttacctaagtgatttttagaaggaaaaatttctgtaaatccttctttattttcgatacttatttcagttccgtttgtataaatagggtaatataagtttggtctattatcaatattaaaattatttttgcctgaattttctaaactattatctaaaaaataaggagaaatttcatcttcaaagatttctcttgtttttgcttcatacacataaggcataattttttctaaaaaattcatattttgttttatctcaagacttactttatctttatttttacaataaactagaatatgttcataagttgaagcgaaaaagttttttatttgtctaccagctttattagatactcatataaaatttccaataaagttataatcaaaaatttcatccattaacacttttaaataagcatgttcattattatctattgaaactaaaataactccgtcttcttttagaagttgttttgctaattttaatctttcgtttaaaagatttaatcatcctgttcttgaaaatttgtcccgatatataaatttatcagcagttatttcatcatcagttaaattatttccatcatctgatgtcttttgtgtgttataaggagggtcaatgtagattaaatcgaagttagaatcctctctctctctactcctataaggttctttaaaacatcataattttctccaataattaaagaattttgtaaattatccttcatttttgaagaaaaaaaagataatttttcatctttttcaagtatcgcgatgctttgattattaatttctggcgcttcatcaaagacaaatccagttgctactctttgttttaaaaatcttcaaatttgttcaaaatcatctatagaaattttgtcattattttttaaaatttctaaatttagtttaattaattctttttgattttcatttaaagatgatttagaaatttgttctaactcctttaaatgatctttcaaaagttcttcttttttgttcatttttctccttataaataatttataaagattgtagcaaatttcacaaaaaaatttatttttcttcattttcttctttgtatggtcttaaagaagaaagagtttttagtacagaatcatcaaatttttctttatctttattgattccgaaatcttttaaaaggtttttaaatttatcttttaattcttgatttgttatatcattatttaacaaagaagtgttgtaagttttagatcaaaatacatttaaacttgtatcaaatgcttcatttttcttgattcattcaaagtctttttgaccttttgtgccttgtcctttattaattctataaagtctttcatatgtcacgttttgaccaatattattttcattattagttactaaaacaaaagaacgtcttccaccatcttctttgttgagttctaaaacggcttgtgcagtagttccagaaccagcaaagaaatcaaggattctaatgtcttttttgctagatgccattttaattaaatactttactaattcaactggttttggatagtcaaacattttatctttgaaaatgcttgtcatttctttagaaccttgttcagtcaaaatattcaaatgtagattgttttgattagcaataatcatattagtaaaaggaacgcctttttcaactaagataaattgtttagttcttgcatcgaatttagcatattgataaacttttttataagccactcagttgccttgttgagtttttttgatttctactaaatttaaagaattcgcatagtcaaatagttctttggatcatatataacgcattgtttgtggttttttaatattttgataaattctaaatttagttccatcaggagcttctaactcataatctagagaagcttgataatccaatcctttatatgctagtctttctaatctataataaccatattgttcaaaattatcatctttaagcttatattctttgtctaacttttcttgagaatgtcttacataatcaaatcttaatttagttttctttttagcataggttactatgtattcatttacaacattgacagttttgatatcttttatatctttatgagaaccaattgatgatttccttcaaacgatattagcaacgaaattttcttcaccaaaaatttcatccattaacacttttaaataagcttgttcattatcgtcaattgaaacaaatataactccatcttcttttagaagttgttttgctaattttaatctttcgtttaaaaggtttaatcatcctgttcttgaaaatttatcccgatatataaatttatcagcagttatttcatcatcagttaaattatttccatcatcagatgtcttttgtgtattataaggagggtcaatgtagattaaatcgaagttagcatcctctctctctctctctctactcctataaggttctttaaaacatcgtaattttctccaataattaaagaattttgtaaattatccttcatttttgaagaagaaaaagataatttttcgtctttttctagtattgcaatgctttggttattgatttctggtgcttcatcaaaaacaaatccagttgctactctttgttttaaaaatcttcaaatttgttcaaagtcatctatagaaattttgtcattattttttaaaatctctaaatttaatttaattaattctttttgattttcatttaaagatgatttagaaatttgttctaactcctttaaatgatcttttaaaagttcttcttttttgttcatttttctccttataaataatttataaagattgtagcaaaaaaattaattttttattcttctttatatggtcttaaagaagaaagagtttttaatacagaatcatcaaatttttctttatctttgttgattccaaaatcttttaaaagttttaaaaatttatcttttaattcttgattggttatattgttatttaacaaagaagtgttgtaagttttagatcaaaatacatttaaacttgtatcaaatgcttcatttttcttgattcattcaaagtcactttgaccttttgtaccttgccctttattaattctataaagtctttcatatgtaacgttttgaccaatattattttcgttattagttactaatgtaaatgttctagttccgccatcttctttattcagttctaacactgcttgtccagttgtacccgaacctgcaaagaaatctaggactctgatgtcttttttaggttttgccattttcatcaaatactttattaatctaactggttttggatagtcaaattctttactattcaaaattgaatgaagctctctagcgccttcagctgtataaatatttgttttcaaaccattatctccagattgtatagtgtttataaaaggaatacctttttcataaggaattatttttccttcttctgtatcaaatttagcatattgatattcttttttataaactactcaataatcttgtttatttttcttgaattcaattaaacccaaatttttagctttattaaaagtttcttttgatcatgcatatgcagcgctttgaggtttttgaatgttttgatatattctaaaattagtaccatcaggagcttctaattcataatcttgtccaggtctataccataaaccgtttctaactatagatactagtttgtattttccatatttatcaaaattttcgtcttttaatttatatgaatcatcaagcttttcttgagaatgttttgaataatcaaatttacatttatttatattttttgcataagttattatatattcatttacaacattgacagttttgattaaattagaattttgaatacttccagttgctgatttccttcaaatcatattagcaacaaaattttcttccccaaaaatttcatccattaaaacttttaaataagcttgttcattgtcatctattgaaacaaatataactccatcttcttttaaaagttgtcttgctaattttaatctttcatttaataaatttagtcaaccagttcttgaaaatttatcccgatatataaatttatcagcagttatttcatcatcagttaaattatttccatcatctgatgtcttttgtgtattataaggagggtcaatgtagattaaatcgaagttagaatcctctctctctctctactcctataaggttctttaaaacatcataattttctccaatgattaaagaattttgtaaattatccttcatttttgaagaagaaaaagataatttttcatctttttcaagtattgcgatgctttgattattaatttctggagcttcatcaaaaacaaaaccagttgctactctttgttttaaaaatcttcaaatttgttcaaagtcatctatagaaattttgtcattattttttaaaatttctaagtttaatttaattaattctttttgattttcatttaaagatgatttagaaatttgttctaactcctttaaatgatctttcaaaagttctttttttttgttcattttttctccttataaataatttataaagattgtagcaaataaattattttttttaattttcttctttatatggtcttaaagaagaaagagtttttaatacagaatctttaacttttgatttatttttatggattccaaattcttttaatagttttttaaatttatcttttaattcttgatttgttatatcgttatttaacaaagaggtattgtaagttttagatcaaaatacatttaaatttgtatcaaaggcttcatttttcttgattcattcaaagtctttttgaccttttgtgccttgtcctttattaattctataaagtctttcatatgttatgttttgaccaatactattttcattattagttactaaaacaaaagagcgacttccgccatcttctttatttagttctaaaactgcttgtccggttgtgcctgaacctgcaaagaaatctaggactcttgtgtttttagaaggaaataagtcaattatgtatttgataagattaactggttttggaaagtcaaaaaaagagtcaaaattaaaaatagatcgaagcatcaaacttccatcacttgtagaagccctttgtatttgctggtgattgtctgtgttttctactaatttatttaatgtagaattaaaaacaacacttctaggattttgtttttttgaatttggtattttatcttgaacatcatatctaaaaacttgatatgaatctttaattttctgaactttaatctcattatttttaactttttctaaaaaagtttgttcagaaactgttcatcttccatatttattttttcttactgtttttggaattataggaacatagccctgtgaaattaataattgtcgttcacttgtagagtagtcataaattattgtatcagttgttaagtcttcagtaattaaattaaagtcgatattattatccgttttgaataaatttaatttttcatttcatcaaataatgtatgccattttctttcgatcaaaaattgtttcttcattacttcctttttgaaggattgctaattttttctctcatttttgaattttttcatttcattttcactggtccgaattttccgcgatgtttatttttttaatcttcagtttttcaatattttttgaataaactaaaatatattcatgattttgtgaaaagtattttgcatcttgtttactacctcaagcacttattcatattaaattaactacgaaattttcttcaccaaaaatttcatccattaacacttttaaataagcttgttcattatcgtcaattgaaacaaatataactccatcttcttttagaagttgttttgctaattttaatctttcgtttaaaaggtttaatcatccagttctcgaaaatttgtcccgatatataaatttatcagcagttatttgatcatcagttaaattatttccatcatctgatgtcttttgtgtattataaggagggtcaatgtagattaaatcgaagttagcatcctctctctctctctactcctataaggttctttaaaacatcgtaattttctccaataattaaagaattttgtaaattatccttcatttttgaagaagaaaaagataatttttcgtctttttctagtattgcaatgctttggttattgatttctggtgcttcatcaaaaacaaatccagttgctactctttgttttaaaaatcttcaaatttgttcaaagtcatctatagaaattttgtcattattttttaaaatctctaaatttaatttaattaattctttttgattttcatttaaagatgatttagaaatttgctctaattcctttaaatgatcttttaaaagttcttcttttttgttcattttttctccttataaataatttataaagattgtagcaaaaaagaacaatgaaaaaactaaaaagtaaaggtatttctgcctttactttttacatattaaattaactatcaaattctacttctttttgcatcatagaatataaatcaattgatgaatctgcatctatttcttgaactaatcatgtttttttgtaatcacaaagttgaataaattcatctcatctgttattacctttaatttcttttaaagttacaacaattccaaattttattgaattttgttcctctgaagttgatctatcttttttggttacactaactcctcaggcatcgttgtcgatatattttttcggattgtttttaatttgattattttttacttttacaaactcaataatatttttgacattgtctcattttctaaacaattctcttacttttttttctggtaaatttaagtttccttcataggtttgtttgtttttgttgattgagtcaatttcaatttttttattagaattaatttttaattttccaaatttaaaatctaattctgtgtttgtataatcaataccttgtaatctagatgttgttgtgaaatagcataaagttgcttttgtaataaaaggaaaagtattatttgatattggaacataaatattatgattgtaagtttgatattctaaagattcagagtttattaaaaatttaatttcgtcttttttactttttataatttcttgaatatgttttggtacaacaccataaccttttgtatttaaatttgtcatattttctttttgtcaactaatagcagaatcaattatcaaagcttttgctaattctcttggtaagcctaaaatatgaattaaaaacgcaacttttcttgtaattcaaggtgcagcgaatgaagttccggatacagtgtgttgcccttcgggtgtacaaacattaatgttttcaccataataacttacatctggtttgataaaaaaagaaagagaaggtccttttcttgaaaaatcagaaggatttccttcattatctacagaatttactacaattgagttaatagaatctgctggtgaaccaattctttcaacattaggatataaatctgatttattagttccagcaactacaaaaataatatcatatttagcttgaagctcatctaataatgaagctattggtgaaatattgaaaggattaatttcctgtattgaacccaaagataagtttcaaactttaatatctaaatttgcaagaacaatttcttctatcatttttaatatagaaaatgtattatagttgtttgaggttgatactccgaacaatcttactctaaaacttccacaaccatcttctaattttttatttgcacttggaccatctactattatataacttacagcagtaccgtgtaatctatcttttggatttataggaatatttttatctaatttattatgaaattcaactcattttccaaaataaacttcctcaggattttctacaaaaaaagtatcaattactccaactattggttcgttatcgggattagggatattgattaatttttgagtagattttgaaacaaattctgattcatctacttttacattatcctctacagccattgcaactaaataagggaatttggctagtaacagcttgtattcttcaatgtttaaaataaccacagaatttttaataggtaaagacttatatcgtatatttgcttctttaaaaatttcaaaaatatctattgcaacgtcatacaaagtaacaagaatattatcatttaagtcattagtaatttcttttctttttgttctaactttttctagaaaaaaagcatcaattataataccaatataattagttttagaaatgctgaatttattaaaaagtgcttcaaattcctttggattttcataaatattttcaatatcttgataatgaatttgtttgtcaaattttagttgtgaaatttgtataactttttccaaatttttaacagcttggtaaagtacttccaaacttacataatgagtaataatgtgctttagtgtattgtttgattggtcaaattgaattcctataattgaactattattttttcgtaaattagattctaaaaaatattttactctattagatttcgcaactacatcattgtaataaagagaaacgattggttttatatttaaagaattttttttattttcttgaattcaaaattgaataagttgttttaaatcttctaaaagactttttaagtgttctatacttacaaatgcatttttaggaatattgggatttcctggagtattaccctttttagataaaaactttccatttttcaatcataaaactttatttacagatttactcattattttcttccaaagaatttgtttgttgtgttataccttgatgtttgttttttaaaattgctatttcagaagcagaaaaaccttgagtttttaatttttgtgcacttggcatttctttaaaaagcttaatatatagttgccttaaataatcataaggttggtcggtgttgcaaaaagcaaaagaaattttgattagattttttaaatcacctggcaacggaatattgttgtataaacttaaaattttattaaacaattctttatttttggatgtgttttcaaaaatagttaaatagtaatctaaaatattttcagcaatttttaataattcttttttagaatatctatcaaaatttactatgtaatcaaaacgtcttaataaagctttatcaagaaaatcttgcaaattagttgttgctattaaaatagcttttgaactcaagtcatccattccttttaatacagctgatacagctcttcccatttctcttaaatcttgagaatccattctatttaaagctaaagcatcaatttcatcaaataaaattacgattttatccaagaaaggaaaattgttaatttcttcaaaaagttgtgaaatatttttagtagtttgacccaacttactatcaattattgaagaaaaatcaacaatatacagaagtttttttaatgattttgctatgtatttagccgattcagtttttcctgttccgggaagcccactaaataaaaatttatttacaagagagttgttttttgttgatcttataatatttaaaatatcctctttaatatcttttggtaaagggatattttctgaatttaaattaactttttttaaaaatccaaaatcaaagtcatgtatttgagggacaaaaacattgttatctccagctaaaagacctaatatgtattcagctatttgataatcgcctttattactaaaatcttgagaaattaaatacgcttcatttctaaaaccagcttcatttctgtttgcaaaatatttaattaaattaataatattttcttttttcattattactctttctgttatttaattttataaaatataaaaaatttttgtactttaaaattaaaaaagttcatttttgagatgataccctttcttgaataaatttttgagtgttttaattaattataatttggaatgaatgtttccctaaatttaatgggagacattcattttattttatctttaattcgtttgtaattgtaataataaatataatttgcaattgctttgtgaaattatttaaaagttaaaaattctttttcgcgaccataaaaacattctctttttaatgtccaaaaaatgattcaatgatgctattatctaaacaatttccttttcgagacatggactgagttattcctttttgttttaatttttctgaaaattgtttatgttgatattgtcaaccttgatcactgtgaaaaattaaaccttcaagatttttgtgttttcaaaaagctctttgaagcatttttctaatttgttggttgttagcgcttgtagataaatctcaagcaataacttcaccattaaacatatctaaaatcggtgataaatatgcttttccaaatggacagctaaattcagttacatctgtagttcatttttgatttggttgagtagcaacaaaatttctatttaaaatattgtctgcaattttgccaactgttcctttgtaagatttgtattttcttctagaacaaattgctttgagattgaattttttcattaatctgcgaacttttttaagtccaattttatagtctctattattaagttcagcttttattcttctttttccatatcttgctttattttcttcaaaaataagcttcatttggcttataatttcttcatttttcttgtcaaaatcttcttttttgaattcataataaaaagtagatataggaatagaaaactcttttaatacttgagttaatcgcaggtttttatcagcttttactctattatagattttttttattttttcttgccttggttgatttgagtcaaagatctctaccaaggcttttcacttttttagtacttcaatttccttttttaagagtttattttctttttcaaaatttttttttctttttttaaatgtttaagttcttctttaagaagtttgagttcttcatatacagatattaaagaatttgattcatctttgctgtcaaaattttttgatacctttttagctttattattacgaatcttaaatttcattattggtcttcctttttttaattctaaaccactaatccctaattctaaatattttttcgttcaaaaagatattagacttggattaagattattttcaagtgaaattttaacaatttgttcgccagctaaaaatcttttaactatgtttaatctttgatctatagttcactttttatttcgtggttttttcttaagaccttcaactcctaatttgtcataaattttttctcaaaaatatacttgatttaaaaaatttttctgacttgttttagcaaaatcaggctttttaatttcaattctttttttgtatttttttacacattctaatttaaattctaatgaatatttcataaaaaatccccctttctatttttctaagaaaagaggatctgctcactcgtagttttttattatatttttctttatttttaaagctattttgcaaatttttgcataataaaatccaaatctaaatcttttgtggatttaacaactaaatcagctgttttaaaagtaggatctaattcttgtgaaattacaactgcaatcatattagcatttttaatagccataactccagcaggagcatcttcaaatcctatgcattctcttggatctaaatttagtccttgtgctgcttggataaaaatgtctttagctggttttccatttttaacatttgcaggatttactataaaatcaaagaaatgtttaatttctaatttttctaaaatcgttggtgcattatggctacttgaagcaatcgctaattttaaatttcttgattttgctttagaaatgaagctaaaaatattttctaataaagaatttttattaatatgtgtttgtaaaagttttttataaaattcatttttttcttcacaaatacttgctaattgttcatctgttaaagcaagtttgttttttgaaatattaataattgcttttaaagtatctaaacgagataaaccttttaatttttcattatcttcttttttgtaatcaatatttaattttttaactatttcttttcaagctataaaatgtaattcagctgtatcagtaatcacaccatctaaatcaaaaataaagcctttaatcatattttacctcaaaagtttttgcttgtttttctacggtagttggcactttattaatgtaaataaatcctttaaattccttttgagaaatgtttttaattgaaaaattttctttattaacactaacttcaaataaacaattttgatataaaaatctataaactaatttatctcaagcagaaggtaaaattggatctaaaaataatttatcatcatgtcaatctagtccaccaaagccaaaaactatcatttgataaatagcagctagtgaaccagcgtgaattccagcatctgaagtattcatttgtggtccaagatcaatatttattccgtatttaaaaagttggtaagctttttcaaccatttttaatctagctgcttcaatggtataagtagctggtgaaagtgaagaatcatgagtggtaatttcttcataataattgaaatttttccttcttatttcttcattataaagatgtggaagtaaatttaataataaaaccacatcagcttgtttgactaattgagaagctaaacgtttgtgtccctctttagttgaaaaaagttttttaccagcatcacctaacatttgaaaagggcgaacatcaattttatccagttttaaaaactgatcattttcagcaatgattaagtctttatttggctgttgttgaattaattttttagaaacaagtttgagttttttctcattaatcggataaggaattttttgcttgattttttctcagatttttactttatttttcttcaagagtttgatatatttcaaagctaaatcaatattttgtttagcaaacatattaatataagcgttgttatctatgtttcctttatattcatttggccccataacatctaaaatagcaaatgaaccatctagttgtaattcagctcgattagaataaaaaatagctgtgtcaattatcatttcataacccattttgttcataaattcttcatctttgctaatttgataatattggtttacagcataagcaatatcagctgatacatgaatttcttgtcttcttgaagcaattggaacttgttttccactaactacatcagcttgacctcaataaggacaaacttcaccatctgttggtcaagccatttcccaaggaaattgtgctccttctaagttgctttcttgttgtctttcttttacttcttttgctttggctcttgcgcctttgattcctttatatctataagttaaaaggtttttcacaatttttggttcattaaaaagataaataggattgataaaaaattctgtatcccaataagtatgtccttgataaccttcaccggatagaccttttgcaccaacgttcatgtttgttgaatgtcttgggacaaaaccatttagatgaaaaatagcaaaatccaaagctagtaaatcatacttactttgttgatcttgaccttcaatttgaacaaaaaattgatttcaaactctttggtgcatcttctcaattgaagctttttttaatgttttataacgtgaatttagtagtaattgatgtttttcatcagctctttgttttacttgttgtttgtctaaaagactatgttttccatctacagagctatgaactgacattagtttttctaaaactataacatcacctggttttactttaagttttattttaaaacctaaataacggcgtttcatttcaacaatgtagttgtcatttccgcctttaatttgttgaccatttaaataaagtttagaaatcaaattgtgaattactcaacgtttagaaaaagtagtttgttgttccatttgaattgattctgttgttggtcgagttttaaaaccttcaccaaagtgttgagttcctgtgtttgttacttgggcgttaatggctggttttaaaataatttctacttcttggttattggtggtttgttcaacttttatttctattttttgtgcatacacatatctatcgtcatgagaaacaaaacgttcaaaatgtaataaaaatttcccgtattttcttcttatttctagatttctttctaaaaaaccatctctaattcaaagagttttgttgtatttatcttcagttttaacttcaaattcttctgattcaattataatgggtgtgctcattaaatcagctaagtttacaagttcgggaacatcaaattttgtatcttgattgaaaattccgttgacataaaatccttctttgttataagaagttctttcttcatctgcacttctaattcccatgtgaccatttgcaaggctaaaaatagattcagtttttgctgttagagctttattgaacttgacttgtgatactcttttgttatcaagatcataatttaaataagacatgatattccctttaatttatagttgtttttttattaaaatagactcaaaaggcctaaaaacacttttaacaatttttttatctttataagaactaagtagttgaaaattgttgtggaattgagctttaatttctttagaagttagatttaaataagcaataattgcttcatttttatagcttcttttaatcattactaatccattatcaagaacttgacactcagatgttccatatattaaaacatcgtgaaattctttttttcttatcttaattagcttttgataaaagtaaaaaatactatcacgatcttttaatgctttttcaacattgattttgcttgatcttcttcctgtttttaaccaaggtgtttttgaaagattaaatccagcatttgttgaactatctcattgcattaaagaacgacctgcatcacgtgagtttatattcatatatttgaaaaattcatcttcactataaattttttctttgtctactaaagaagcaaatccattaaaaatatctacatctctaaattgacttcttttttcaaaatgagtatttaataacccaatttcttcaccataataaatgcaaggaattccttttaaaacaaagagcattagtgcatgtgttttagctgattcttctctaaaaatattttcatcacctcagcgagatacacttctagaagtatcgtgattggataaaaaattagtaaacatatgaggttttatttgttgattatgttgaaaaggttgttgttgaataataaagtttttgtaatctcaattagcatcaaaaccatttcttcctgtttgtttacctcagccaattcatcatcaagaaaagttgtaaaaattttgtgaaacttgattttgtccagctccgtaatttaaaatttcatcagcagttataccagaagcttcacctaaagtataagcatctggtttgtcagaaaatgctaatttattaaatgtttttagatactcaacagcccctacatttcaagcaaaataaggattttgatctacattttcaaaggtttttgagacatgtttaatagcatcgagtctaaatcctctaactcctaatttatatcaaaaattaataacatcaaccattgctttaatagtgtttggatgtgatcaattcaaatcaacttgttctttagaaaacaaatgaaaataatattttttaacactaggaacatactctcaagctgaaccaccaaaaatacttgttgctttttgttcttcacttgttagtttttctcttcaaatgaaataatcatgctcgagattttgagtggataaacaagcttttttaaatcatttgtggttattggatacatgatttaaaacaatatccattatgatatcaatacctaattttctggcttgtgttgctagttctttaaaatcttttaagctaccgaattgttttcaaactgatttataatctaaaacatcatatcctgcatcaacaaaatcagttttataaattggacaaagtcaaatagcattaattcctaatttttttaaataaggtaattttaaagttataccttttaaatcaccattaccatcattgtttgaatcataaaatgaacgtggaaaaatttgataaattattttatcttctaatttaattgttttcattatatctctttattaaaatggatgaattagcttctaaaattccccttttatgcttgatttttgaagaaaataagactttatcttttgaagacacattataattaaaattttcttttgagaagttgtgtattacttcgacaacttcttgattttgcttgatttgataactaattattgccttatttttatcaacttttaaaaaggttaaattatctttaatttcttgattagttgctagtctaaaaaagttggttctagctctaaatttatttaatttagctataaaaatgaagacaaatttataaactaagtcattttttaaatgatctcattttaaaccatttgtataatctgaagttttataagaattaggatgataagacaaattatctggttgttcattgaaatcatcatatgaagaaacaacacatctatttgaatcttcacctgaaagatcacatggttttgattgtaacagttcgctacctgcaagcattaattgtctaccttgagcaaaaacactcatcatcagtgcttgacgataaatttcgattctttgttttaaagataaattttgactcgcagttatattgattttatctcataaagtaaaaccatcgtgacaagcaatgtaatttaaaaccattgaaatatctttagctcataaagaataattatttgcagcatggaaaatatttttgaaatcataatcttgaatatttcctacaattgaactaacaaaatttttaaataagtctttattttgcttgataattaaaccagattctacacttggatcatcactacctttaatgctgtttcttatagtatcgttaaaataagcaaaggataaattattagaattaactccttttatatatgatttttcataatcaagatcactaaaaggtcaagcttctccgtgcaagataatattagaatttatctttcttagctcttgagttagttgatcaatggtttctttatgcataaaacaagataaatcaaatctaaatccatcaacattaaattctttagcaaaatattttaaagaatcaattattaattttttagtcataaaacgttcatcagcaagtggcggatattttacaggttttattttggcttgatttctgaagtaataattttttattacgttgtttaaaatgttgttagtaaacatatgattataaactacatctaaaataattccgataccatttttgtgtgctagattgacaaagtttctaaattcttttatccttgcataaggattacttggatcagaagaataaatcccattaattgaaaaataactatgtggatcatatcctcagttataatttgtacttcattttttagcttgtgatttataaataattttttgatcttgatcattaacactaaaagctgaacaaattggcagaagctgaatgtgtgtaaaacctaattttttaacataagaaaaaatatcagcttcaattagagcattaaaagttcctagtttatttttaaaaaggttttgatcttttaaactagtaaaatctctaacatgaagctcataaatattcgcatctgtgtgattattttttttataaataagttttttaggtttttgtccagcaagagtggattttatattaattaaagctccaaaacctactttattttcatcttcttctcagttaaaagttgcaagtgaaatagcatagggatctagagcaaaagttattttatttttgttatgaaatattttatattgataatataatccttcaaattttaaaggaataaaagcacttcaaacattagatttttttgttgctaaaaaactagttacaggagttgaaaaattacttttatcaaagattaaaatttcaacttttttagctagtggttgtcataattttacactgattttattacttaaaaatttgatacctaaatcagattttttatacgaatattctttatcaaaatcatcaaaaaaagctttatttttcacattgaaaattatagtttaaaactaagtagtaaattataaaaattttggattcttgatgtatcaaaaattagaaaaaaattagcttttttgcttcaaaaatgaagcaaaaagaaaaattattgttttaataatgaacagataattcttggtgaaaaaataaaaaatgctctggttttacatagtattttccagctatgcaaacacctattttgtcataacctcaaaaggtaattacaaccatattttctaatccaaattttgctactttttcatatcttaattcatatacaatatttttgatttgacttttttcatttaagatcgcaactagtggtctatttaagtccaaaacttcgtctttttctaagtcattttcagatataaaaacttctgcatcagctatatgttcaccttctttaaaaagctgtttttcgtaatatctataaccattaataaagttgatttttctagattcaaatcattgaggaatttgttgttgtttttgtgttgcttcaattttatccacatgcagtaaaaatgaaatgggttttatgaaattgtgaaaattttcagctataaaataacctttttttggcacagcataaattgcaccaatggaaaataatctttgatacactctaattacaacagttcttgaacaagaaaatttatccattagtgcatgttcggaaggaagaggacggtttaatcttcctcttttggaattaataattgaaatcagataatctattactaaattggtctttgtttttgcgttttctttgttattttcttgtgcgcttaaaaaatctctaacatatttttgttcattattcatagcatatattttaacaattttaattaaaaactgattttaatttttaatttttaaattaaaaattaaaaaaatgagagaaaatgaggtgatacccttttcttgaaaaaatttttgagtgttttaattaattataatttgaaatgaatgtttccctaaatttaatgggagacattcattttattttatctttaattcgtttgtaattgtaataataaatataatttgcaattgctttgtgaagttgtttaaaagttaaaaattctttttcgcgaccataaaaacattctctttttaatgttccaaaaaacgattcaataacgctattatctaaacaatttccttttcgagacatggactgaattattcctttttcttttaatttttctgaaaattgtctatgttgatactgtcaaccttgatcactgtgaaaaattaaaccttcaagatttttgtgttttgaaaatgctctttgaagcatttttctaatttgctggttgttagcgcttgcagacaaatctcaagcaataacttcgccattaaacatatctaaaattggtgataaatatgctcttccaaatggaccactaaattcagttacatctgtagttcatttttgatttgattgagtagcaacaaaatttctatttaaaatattgtctgcgattttgccaactgttcctttgtaagatttgtattttcttcttggacaaattgctttaagattgaatttttccattaatctgtgaacttttttaagtccaattttatagcctctattattaagttcagctttgattctccttttttcatatcttgctttattttcttcaaaaataagcttcatttgacttataatttcttcatttttcttgtcaaaatcttcttttttgaattcataataaaaagtagatataggaatagaaagctcttttaatacttgagttaagcgaaggcttttatcagcttttactttattataaatttttttattttttcttgccttggttgatttgagtcaaagatctctaccaaggcttttcacttttttagtacttcattttccttttttaagagcttaatttctttttcaaattcctttttttctcttttaaaaagtttgatttcttctctaagaaatttaagttcttcatatacagatattaaagaatttgattcatctttgctgtcaaaattttttgatacctttttagctttattattacgaatcttaaatttcattattggtcttcctttttttaattctaaaccactaatccctaattctaaatattttttcgttcaaaaagatattagacttggattaagattattttcaagtgaaattttaacaatttgttcgccagctaaaaatcttttaactatgtttaatctttgatctatagttcactttttatttcgtggttttttcttaagaccttcaactcctaatttgtcataaattttttctcaaaaatatacttgatttaaaaaatttttctgacttgttttagcaaaatcaggctttttaatttcaattccttttttgtatttttttacacattctaatttaaattctaatgaatatttcataaaaaatccccttttctatttttctaagaaaagaggatctgctcattttgtagtttttttattttatttttttaatgaaattcaattttaataacctggtttttttaaaatctgaatagatcttttgaattgaaaatgatcttgtctataagaaataagcaatattttttcatcatctaaaaaatgaatatgccaatcaatataattttcagatattttaaaaatcctggttcatatcagggaataatattatttttttgtaattacactaattattttttatttattaattcttcgaatgtttttttaacaattttgctttgttttaaatcgatttgaacttgtgtagcagataaaatttgatctttgagaatttgacttgaattttgatttaaattagaagtttctaagttctttataagtaatgcttctttttcaagtattttttattatttaacagcatttgaaaaaattgtttttttaaaatcgaagtgatctattttattaataattctgtttgtgtttttcttgaatggattgcatctagattatcaatgtttgatcttggactataaaatctgtttgatcttcttaacaaggagtaaaaaattttgacaaaaatcttctgaaaaagcaattcaagaatcttttacttgttttattagtaaattttttggattttgttcatttttctttttaagcaatgatttaatgcttcttcttttttcttaatcttctttcaatttaacttctaatttatatttgtcacctaggttttattttccgggtttgcactacaagataagaagaaaaaggaaggaaaaaataaaataaatcaataatattatttttatttttgttttacaaattttgtctttaaataaaaaattatgaaaacaataaaaataaataaaattttacaatttgtaatttttgatacatatcaaaagaaagataaagccaatttttataatttaatcaaaaaagaaaggatataaatttgaacttaaattataaacaacttgctttaaatatgaaggtaaaaattcaaagttttggtggatttttatcttcaatgattatgcctattattgggatttttatagcgtgaggtttattaacttctttttttattccaactggttgaactcctaatacaaccttatctggaatggttgctgttggaataaaatatttaattccaattttaattggttttttagcgggtaaaaaaatttaccaaattcgtggtggagcaatttctgctttaattgcagctgctgtaattgctgcaggagatagtgatatttttaaatctatagctggtaaagaatccgtaatgatattaggagtaatgattttatctccattagctgctttagctttaaaacatagcgaaaaattatgaatcaacaaaatccaacctggatttgaaatgttagttaataatttttatttaggaattttaggatttttactttgttttccagcattttatttttcagcttatgttattgcttatattaatgtctttttatccttaatagtaagtaaaatgcaagaaaacaaactatatcctatagtagcaattgtggttgaaccagctaaagttttatttttaaacaatgcgataaatcacggaattttttctcctttaggaatacaagaagtacaaagctctggaaaatctattttatttttacttgaatcaaatccagggcctggtttaggaattttaatggcttgattaatttttggtaaagataaaactgtcaaaacacaagctggttcttcttcaattattcactttttcggaggaattcacgaagtttattttccatttgttttattaaggcctattttaattattgcagctattgcaggaggagtggtcggaaatgctttatttcaaattttcaacgttggtgctgttgctccagtttctccaggttccataatagctcaatatatacaagtaaaaaaagatgcacttgatattgcaggtcttagtttgggaatttttgcttcagcattgacttcatttttagtttctgtaattattttatactttgacaaaatcaaagcaaaattcttgaaaaaagaagtaaaaagcaacaatattgatcttgctaaagcacaagaattatctaaatcaatgaaacttaaaaaagaagaacaaattgaagaaaaagtactagatttttctaaaatctattttgtttgtgatgcaggaatgggttcttctgtaatgggtagtggaattttgaaaaagcttctcaaagaagaaaatatgaacaacattgaagtattacacaaatcaatttccaacatagacaaaagcgaaaaatgtattattaccatttcttctttagcagatcgaatcaaatctaaaaatcctgatgcgcactatttcataataaattattttttagatttacaaggatacaaaaacataatcaatgaaattaaaaacaaaaaataaagttttaattttcggtgcaggtagcattggtcgtggattgattgcttatattttttacaaaaatgattttgaaatcatttttgtagataaaaatcaagagcttataaataaaattaatgaagaaaaacaatacaaaataattgatattaacaccaaaaaagaagtaattattaacaacgttaaagctattagcttagaagatgcaaaattaacaaattatttaaaacaagcaaaatatatcactaccgctttaggctctggaaatttaaaatttttagttcctcattttgaaaagcactttcaaaactattcaaaaacacaatttgttttatgttttgaaaatggttatagaatctcttctgaatttgctaaattattttcaaatataaaagcaaatatcaaattcgtagatttagtagtagatagaattattccgaataaaaaaacaaataatattgatgtttttgttgatgaatattttgaagtaattgctgataaaaatatacaaaaaggaagcaaaaaactcgatttaattgactattgcaacaatttggatgcttatacttttagaaaattattacttgtaaattcactgcattcttatttgggttatcttggctatctaaaacaattaaaatttgtggatcaaagtgctaaaaatttagaaattagcaaaaatatcgaacaattagcagctattaatatcgagattattagattaaattttaatgaattcgaaaaagaatctttacaaaaatactttcttaaatcgctaaaacgctttaaaaatgaaggattttgtgatctaaatacaagagttgctcgcaatcctattaccaaaattggtaaaaatgagagatatgatttaatatatcaaaatgttttaaaattcaatttagataaaggtcaaattttaaaagtgtttaaatctattttgtcatttaattttatagaagatctacaagctcaacaaatccaaaaagctataaaaacaaagcaaattttgaaatttttacaagcaaataccaatttaatttttgaagatattaaaactttaatagagggcttaaatgaataaaatacttaaaagagaaaatatctttttaaaccaagagttaaatagcaaaaaagaagtttttgattttgtttttaaaatattttttaataataattcagtaaaagaacaatatttaaaatcaatgattaaaagagatgaaaattcttctgttgctttaggaaattatttagttttacctcatggtgaagctgattcagaaaaatacattttaaaaaatgatgtttgcatagtgcatttaaaaaaggaattaatctgagacaatcaaaaaacaaaaattatttttgccttagctttaaaaggcgatactcaaatggaattcatccaaattgcaggtattagtttttctgatgagcaaaaagtaaaagaacttgtatataaaacaaatattaacaaagaagatatcataaattttttaaaaaacagcttttaaaaatgtaaaaggaatgtaaattttcttttacattttttattcttattaaagttaacaaatttatttcaggagtataattttttaaagaggtaattgtgttaatcaaaaatataagaaaatcaagatttttgtctcttaaaataaatttaggtaatatttttattgaacaaatttctcagttgttattacactttaatctgatttttttaaaaaaatacacaaataatataggaagagtcttgctaaatttagtaaaaaataactaatttaaatagggttattttttccatctatgtttgttgctaagttatttattttgtcaaaaacttttaaaaatttacctgtaggaattaaaaaagaataatttttaaaaaccaaaaaaacaaaaactaatgattttgcaaatctaaaattaatacaaaaaatgtgattgataatcaacattttaacttcaagagaaaaaagttattaattcaaacattagagatttaaacagcaatatacaataaagaaatattcaaaagataattaaaacaattcaaataattgttgttatttcaaaaacaaaaaataaatctataaaactaataaatactattaaaaattatagagttaacaaatttatctaatttgtttatgctgttaaaactttgaatagaacttttggaaatttattagcaaaatcagtagaaaaaaataataattgcgtttacttaagttattaatccaattggtgagtttttagaaccactagatactgagcagatccccttttctatttttctaagaaaagaggatctgctcagtactacaatgcagtaaatttttataatcaaacaagaaatagtgttgattgaggtagtttttattctatcattacttcaaaaatattaccttttaatgaatatataaaatcttttttaatacttttaaaagtttttttcaaatatattacaaattaaatttaaatagttcaattaaatatattttaaaatctgcaaatgttataaaattaatttctaactttaaagggtttttagtagcattaattcatcagcaaaatcacttgcaatgaaattacaatcatttgttcaaaagaatagtttcaaaaaaatagcattaacagctacatcaattgttaatcccacaggagaattgctaaacttggtcgacactataatttctatttcagatgtactaatcacacaagttttagatatagttttaagagtggatgaagattaaaataattgtgacaaaagaaaaattaaaattttatagttttttaaattttaaaataaaaaaactttctacttttacttcttttttcttcattttgagagtaattttttctgtttttttagcaattaatgttgtaatttttgagtttataactattaatatttgatctaaaattaatattgataaattatttgaaaaaattcctttttttgtttactgaatttttttatcttttttattagtttcttttataagtttaataatttacaaaaaaattaagaacaaaaataaagaactttttcttcgatgctatcaaggtttttactatttatttgaaaattttcaatacaaggatattttttaaagagaaaacaatttattagaagaatttgaaaagtttgaattaaaaaactacaaaaaaaacaattacttttggttttatcaaaatttttcagaaacttactttaattttgttttgaaacagtatttttggtttacttatgttcaatgctaaaactccttctgttccttcattgtattatgtgttttcttcaaaaaatcaatacctttctacttatacagctggttacaataaaaaaagaagacacaaatatcaagagtttttactaacttttgatttacaagacaaaagaaaaatttgtcctaatgaatcatttgaagaatttatgattaaagctggtttacaaaaagaatgtatagaagaatttaacaagcatcaaaaatttcaagattttattaattcagaattttttaaattattagataatcaaaattttgtaaacagatgagcaggtagaatttttactttacaatttaatgcgattttaactcttattttaaatataatactaatattacaactatctgaatttcaatttcacagtggttttttcttaggtttatctatttttatttgaatgtttacaagtggaatttgaggtttacttgaatgaagtatttatataaaaagcttagctttttttgtaatgagtaatttcaataattttgagttaattagtgataaagtgagtttggaaaatagaacaatattaacaaactttactaatttaagtgaaaaagaaaaaataaaagtttataaaatttatcaacttagttctttacagaatttattaaaaaatccatatgtttctctaatttctttttccacattatttaaatataaagttaaaaaataaattttacaactgttttataattaagatatttattagaaaggaaaacatggaaaacaaagatattagaacaatttttagtgattttttaagatacaaactacaaaacaaaacttatttggttatatctttttgagtaggatttttactagcagcagctatctcacttttactattttttggtttattatttagcaacatatttttatttgataaaccagatagtgaatatcgacaagaagatgacttactaagttttttaaaacctgccaaaccatctcaacaaatgatggatattcataataatataaatactattgtttttattttactaggaatatctatatttttagttcttgttttattaggaaattttttattttgatacataaaacaatttagaaaatatcctatatatttaaaaggttttgcctttatttttaaagaagaaaatcaaattcaaaactttttaaattagaacaagaatttgaacaatttaaagcacaaaacttagatttaaattctgtaattattcaaagttttcgttttaatattaaaatggtttatagctattttaatacagcaagaatgtctgatatggatctacaatttattaatacaaaaaaaccatcattagttaaagcaataaatttaaaaattgatataaatcctgcatttgatctttctaatataagtaaaattacaacaaataattttgatcaatttcttcatttttctttattacatgcactttctaaagcagtattatacaaattagtttcacaattagttatattttttagtttaatggcattgatttttgaaattgtatatttaagtatttactgatcagatacacaagcagtaaatttttcagttaaagaagttttctgagtatttcctttagttcttacaactactcctatgtatttacaaagatgatttttaagcactagtttaaaaacttgatttagagtttatttaacttctatttttatgttaaaagaaagaataactaaagaaataagtgaagaaaatgaagaaaaattaagtagatttattacaatgtcagatgaagaaaaaattaaaattttagaagcttttatagaatataattatgaacaaaataaatcaatattcaatgtctttaaaggattttttaatccaatttctggtaaaaaattaatgtagtcgttgttttaaaatcaattaaaaaaatcaagcaaattgcttgatttttaatttattagtgtttttattttttagttttttccacaattaaataatacaaaccaaataaagcagaatcatcaccaaaaacatcttttttgaactctacacagtttcattgatcttgattggttcagagttttgcttttttaattgctttttcaatgattcaataattatattctgctacagaaccaccaaaaacaattaaatttggatttaacataccaattgttgtagcaattgttcttgctattgtatcgatacaatcatctacaatttctctgtaattttgatttttatcataatttgcaataatacttttagcatcaacaaattctaaatttttatcctgagctcttagtgacattcctgtaccagatgcaaataattcagctgcgtagttatttaaatgatgttttctattaaaggtcttagaagttgggatgtgagcaatttcttgagcaaatcctttagctccatgaaaaattttgttattaatgactaatccagcgccaaatccggttgagatagtgtaaaactgagttacaccttttttgttatttttaaaatgaatatgatttgcaaaagccattgcattggcatcgttttcaaaaatagcgtattctaattgtgagttattgagtaaataatctttaatattaattccatttcaaccaactaaattaggtgaagaaagaattattccttttgaataatcagctggacctggaatacatagagcaatagcgttaattttgtattgatcaaccaaatctaaaattttatccaatacttttttgtaattattaacatcagttgtaaatctaatttttttaacaatcttgtcttgatcaaaaatagcaaaacgagtatttgtacctccaatatctatagttgcaaaattatattttttcatcctgagctccaatacttattttaatgctatgataatttttattattatatgttgcttttcaatttttcatatattttttattacttttaatagctaataaatcaattagttcattattattttttaatactcaattttcaaatgttgaagaataaactgcttgtttgttatcaaaaatagttacaacttcatcatttgctgatttaaaaatttgttgattagctagtttgaatttggtttgaatggttgctttaattgtcacacttgtatttaatcttttttcaataattacttcattttgattcaaagttataacaacactaccatctattttgtatttgtcataatatgcaacaaaaggaaaaaagtgttggttatttttagttgaatatttaaaatccaaatccaaaattctgatatcttctaattgagtatctcaagctttttcatcaataataattagcttaaaatctaattcttcaataaataatttattcaaaaatttaatttgtagctgtggaaaaaaagaaaaggaaaaatgcgaaatttttccttttctttgtaacaattgtttaattattttttttgttcgaaagaacatctcatccaacaacgctaactaaaattaaacctttgataatatttttttgagatgattcaacattgagaactaaaagaccttgatttataaccccaattattgaagtacccaaaattgttccactaactgttccaattccaccataaactgaagcaccacctgtgaaaacaactgagatgacatcaagagctaaatcatctcctctacttgaagtagcagatgaaaaagtagctgtataaattattgaagaaaatccagcaagtgcaccaatgataacaaaaataatcattgtggttcttttaacattaactccggataatttagctgcttttctatttccaccaattgcgtaaactgatctaccaaatgcagtattttgagttaagaaagtgaacagtgctaaggcaattcctgtgtataatacaaagtatttcattgatttagttcctaaaccaaagataacaccacttcctgtaaaaagtaagaagataattatttgaataacgatgaatatatatatgttttgtgttctgattccgaatttttgttttgaaaaataacctcaaactcttaaaccaactataattgcaccaaaaataattggcaatattaaagaaaaaattcacacagagcctacttgaatatcagggattccttcaattgttcctgttatataagtagatgatctacttccaatcggagttaaagttgatccacctgaataaaataattgtgctcctttaaaagctaaaaatccaccaagtgtgacaataaaggcaggaatgtttccataaccaattaaataaccttgaatgagcccaatagctgcaccaattaatgtagttaaaataaaagttaatcaaatactttggcctgtattgttataaatataaactgaaaatagacccagtaatccaaccagagttccaactgataaatcaatatttccacttagtatgaccaaaagcatacccattgctaaaattatgatatatgcattattttgaaataacaatgaaaaggtatcaggttgtaataaagttccatttgtaattcctaaaaatattgcaaaaattatcacaaaaatatacaacattgaaaattttttcaaatgatgtaatgattcatctacataataaccagtttttgtattttttaaaaaatgtcttcaattttttttaaaattatgtaattgtcttgaaacattattaaagtggttattaaaaagagattttactttttttgtttctgttttaaaagaatttcaagattctttaaaattaaatttcattattgagcacctcctaaacttaattgcataattttttcttgtgttgcttctgatgttggaatgtgtcctttaataacaccttgagacatcacaaaaattctatctgtaattcctaaaagttcttcaatttctgaagaaataacaataattgttttaccttttgatgataaatctaatagaattttataaatttcaaacttggaaccaacatcgataccttttgttggttcatcaataattaataaatcaaattttgtactcaaagctttagcaataaccactttttgttggttaccacctgaaagagattcaacattgttaagtaaattttttgttttgatgttaacctcttttttttgctcttgtgcattaattatttctttgttattgttgagtataccaaatttagaaaacaaatgtaacgcagcagaagttatattgttttgaatggaaaaaatttgaatcaaaccaacattttttctatcttccgaagcatacataattcctgattgaatagcttgttttgtgtttttgaactttacttctttacctttgtaaaatacttgtccgcttgaaggtttgttgtaatattggccaaaaatggaaagcattaattcagttctacccgaacccacaagacctgaaataccaataatttcgccttgtcttacatctaatgaagcatttttaacaacattgtaattagcaattgttgcatgtggaataaccatgtctttgatttcaaaaataacatcaccaaattttctatttggatctttgagaggaaattttgaagtaagtggtctacccacaatatcttggattaatctgttttcatcaattgtttcttcatttttgttgtattgtgaaatgaatttaccatctctgataacaacaatgttatctgctacatatttaacttcgtttaatttatgagaaacaaaaatagaagtaattccttgttttttcaattttttcataatgtcaagcaatctaaaagcatcttcatcgtttaaagatgaagttggttcatctaaaataagaagtttagcatttttagacaatgctttagctatttctaacatttgctgtttagcaactgaaattgttcctgcaattactgttggatcttcttctagacctaccattttcaaatattttttgcattcagaaatcatcttatttcaattaactttaccataagtagtaagataatttccaatatacatattttcgcaaatagataaatatggtgaaatagaaagttcttggtgaataattgcaattcctgcttgttctgaagcctttgtgttgctaaatgacattaaattattttcaaaaatcaattttccctcatattggccatgaggaataacgcctgaaagaatctttaaaagtgttgattttccagctccgttttctcctactaaactagttacttcaccttttggtactgtaaaactaacttcagataaagcagtaactggtccataaacttttgtgatattttcaagagatagaatattagatttttccaactcaatatcctttcttaaataaaaaattagctttaaattttcactattacaatggttgttatacaaaaatttaagctaatttttatttattttttctaaaataactttaatttaattgttgtatatcttaattatttaaattaattttctaattaaatttttattgtgttacaccattagttggtactgtacctgatgcagaaacagaaacatttgcacttgtagattgctgtgcattagctaatgggttatctacattttgtttagttactacaactggattaactaaaattgctttaatgtttttgtaagcacctactgaaccagctttatatgttgtatcatcatatctaaagtgaatatcttttgtattttcgttgttttttaaagcattttcaacatcttctttagttgctgttgcatttgctttctttttgtttattaatgtttttaatacttctacagctactttacctaaaattacatctggtttgtagatggtcatattttgttcaccatttttaataagtttttttgctgtatcattgtagtcttgaccagtaatgaaaactttttgtacatcataattagtagcttttagtttgtctactgcttgttctgccattccatcatttggtgctaaaaatccttttaaaacagatttagggatagttacattatcatatgtaactggtaatactccatttggcactgatgaatcacgatattgtgtgaagaattgttgaattctttgtccagcgtctccgtaatttcatcctggaacataaactgcattacctcttggagataaatctactactttaccattggagttttccattaatttttttaaaattttcattgctccgttgtaaaagtattgagaattgttgtcatcttgtgatccagctactgcataaaatgaaacagtttcttgtggcatgtgatcttttagatagtttaacatttcagtttcatctttaaatgcaccatcagtttttcctaataatccagctgctaatgaaagaccttgtagttcacctactttttcattatcgtaagaaacatatcaatcatatgaagttgaaccagtaattaatctatcataagcaacgataggaatatttttttcagctattgaattaacagcggttccaactcctcctccattttcaggagcaataataaatcctttaggtgctggatttaagtttgcttgttgagttaatcagttgttttgtgcattttggtctttagtaatagtagaaattgcgccttctgttttgtctatataatttaatatatctttttgtgcattaattcatcttggattatctggatctgttaatgcaactctaatggattcattagtaacagcatgatcttttgtttgtgataaacctgttgctgttgttccacaagctacaaatgaagcaaaagctacaactgaagctgttgaaattgttgataaatataaaaattttttagtaattaactttttcatttgttttccttttagtttagttttcataataaaattatacaaaatataaatacaaaataattttcaaaaaagctttttttgcgcaaaaaaccttttttttttttttttgttgatttaagtatgtaaaacacaaaataaagggtaaaaaaattatgaaaaatgtaaaaagaacctttattgtttatgaggatagttgatttgaaattattaaatttattaactcaattaaattgtatttaattatgtaaataaaaaacatttgaatttgagcagatccccttttcctagaaaaatagaaaaggggattttttatgaaatattcattagaatttaaattagaatgtgtaaaaaaatacaaaaaaggaattgaaattaaaaagcctgattttgctaaaacaagtcagaaaaattttttaaatcaagtatatttttgagaaaaaatttatgacaaattaggagttgaaggtcttaagaaaaaaccacgaaataaaaagtgaactatagatcaaagattaaacatagttaaaagatttttagctggtgaaccaattgttaaaatttcacttgaaaataatcttaatccaagtcaaatatctttttgagcgaaaaaatatttagaatcggaaattagtggtttagaattaaacaaaggaagaccaataatgaaatttaagattcgtaataataaacctaaaaaggtatcaaaaaattttgacagcaaagatgaatcaaattctttaacatctgtatatgaagaactcaaacttcttaaagaagaacttaaacatttaaaaaaagaaaaaaattttgaaaaagaaaataaacttttaaaaaaggaaaatgaagttctaaaaaagtgaaaagccttggtagagatctttgactcaaatcaaccaaggcaagaaaaaataaaaaaatttataatagagtaaaagctgataaaaacctgcaattaactcaagtattaaaagagttttctattcctatatctactttttattatgaactcaaaaaagaagattttgacaagaaaaatgaagaaattataagccaaatgaagcttatttttgaagaaaataaagcaagatatgaaaaagaagaatcaaagctgaacttaataatagagaatataaaattggatttaaaaaagttcgcagattaatgaaaaaattcaatctcaaagcaatttgttctagaagaaaatacaaatcttacaaaggaacagttggcaaaattgcagacaatattttaaatagaaattttgttgctactcaatcaaatcaaaaatgaactactgatgtaactgaacttaacgatccatttggaaaagcatatttatcaccgattttagatatgtttaatggcgaagttattgcttgagatttgtctacaagcgctaataatcagcaaattagaaaaatgcttcaaagagctttttgaaaacacaaaaatcttgaaggtttaatttttcacagtgatcaaggttgacaatatcaacatagacaattttcagaaaaattaaaacaaaaaggaataattcagtccatgtctcgaaaaggaaattgtttagataatagcatcattgaatcattttttgggacattaaaaagagaatgtttttatggtcgcgaaaaagaatttttaacttttaaacaatttcacaaagcaattgcaaattatatttattattacaattacaaacaaactaaagataaaataaaatgaatgtctcccattaaatttagggaaacattcatttcaaattataattaattaaaacactcaaaaattttttcaagaaaagggtatcacctcatttatcaaatgttttttaaatattttttaattaataatttgagcactaatttatttattatttttctggtcaataagattttttaagagggaattttttgctaaattgactaatttccaatttaatttgttgttgtaattgttcatcttttggatgagataataatttatgaattcatttagctaatttaagaaaatctttttctttaaatcctcttgatgtcatagcaggtgtacctaaacgaagacctgaagttataagtggacttagtgtttcatttggaattgtgtttttatttgttgttatatttactttagataatatttcttctgcttgttttccagttaaatcatatgaatatttaacatctaaaataaacaaatgagtatctgttccatttgaaactactttaacattttgtgaaagaaaataatcagcaaagacttgagcatttttggttacttgttgcatatattttttaaaccaaggctgtaatgcttcataaaagccaactgctttaccagcaattgcgtgaaataatggaccaccttggaaaccaggaaagacaaatctattaatttttttactaatttcatcatcgtcagtcataatcaaaccaccacgtgctgatcttaaagttttatgtgtagtagtagtaattacatgagcatatccaacaggtgaaggatgtaaaccaacagcaattaaacctgcaatgtgcgcaatatctgctaataaatacgcccctactttatcagctatttgtctaaatctagcaaaatccacaatccttgaataagcagaataaccagcaataattaatttaggctttatttccatagcatatttttcaatagcatcataatctaataaatcattttcatctaaaacatatggatgagcttcgtaaaatataccactaaaactgattttatatccatgtgttaaatgacctcctgatgctaaagtaagccccataattttatcaccttgatttattagtgctgcaaatgcagctgcattggcaacagatcctgaatatggttgtacatttgcgtatttaacattaaaaagttttttagctctttcaatagctaaagtttctaccacatcaatgttttcgcatccaccgtaatatcttttagctggataaccttctccatacttgttagttaaaacagaaccagttgcgtttaaaacatcttcagaaacaaaattttctgaagcaattagttcaatatgttcttcttgtctttttaattcgttgtttattgctctttgaatttctttgtcatgtaatcttagtcttttcatcttaattgccttctattatcgaaataaaaaacactaaaaataagaatttgtatttttagtgttttaatgttttcaaaaaattattttctaatatttaaagcttcaattgtttgtttgtatgcattgaaatctttttcttttagataagctagtaatctttttctttggttaactttggcaataaaaccacgcattgaatgtttgtcttttttattaacagcaaagtgtttttttaaagattcaatgtcttctgttaatattgcaatttgaactctggtatccccagtatttttttgtgagccaccaaattttaaaactagctcttgttttttttcttttgaaatcattttttctcctttgtaaaatattcttttataacctagaaataacccgagaacctgttatatccaagcaataaataattgtgcactgaaaattatagcactttttaattatttgtttaaagttaataattttataaatgaatctacttttaaagatgctcctccaactagcgctccgttaatatctgcttgatttaataattgctctatattttcttgagaaactgagccaccatataagatagttaaatttttatttgtttgttttctaataaatttgcaaacttgttgtgcttgctctggtgtagcagtttttcctgtaccaattgctcaaattggttcgtaagccactataactttgcttaaatctacatcttttaatgaattttttagttgatattcaattacttgacttgttttttgtgcttcatattcttctaatgtttcacccacacaaacaactggaataatattatttttaattgcttgttgtgtttttgcatttacatctaaatcagtttctttaaaatattgccttctttctgaatgaccaataatagcatatttgacatttaaatccaataacatttgcgcagaaatttcgccagtataagctcctttttcaaattgtgacatattttgaactgctaattctaattttgttgtatttttactaaatgcagctacatttattgcaggaagtgcaactgcaaaatccaaattttgattaattttgtttttattttctatgtatagttgattaaaagcagaaaaaaattcttttgtttgtgtaaaagttttattcatttttcaattaccaataataatagttttactcatattaactccttaattaaactgttttatattttactctttttttgattttataaaaagtgaataatgataaaaatactaaataatttaaaaccaaaagataaaaaataaattgctattttataataacttttaaaatcctttttgctgctttatgcgttgtaataaatgtttacaatttttactaattttgcaaaaaacggaaaaatttaataaaaatagccaaattttcctaaaaatttcaatctaaagaattgaaataacatttttttaattaattaagtctttaaaatttttagatttataaaattattaatagcaaaatttctttaaaaatcacctaaacttgagttattattaaaaaaatacaaaatcaaagaattatattaataagtatttaaacatattgatataaatacatttaatttaattcaataagattaaatagttttcaaatttaaaaggaaaaaaattccttcttttgaaggaattaaaataaaatatcatacttaaattgttattaaataccataaattaaaaacttatgtgattaatctagtttagttgtatgacaaaatccaaaatatttaaataataaaatcctaattaatacaaataaattttaattattttaaaaacaatctctttattaatattactaattaatttttaaattaagttttatttacgaagatcttgatcgtaaggctgcagtgagcgtaggaaatctaaatagtgatgttattcacacttacgctgatgcaaatagtaattcagctcaaaatactgatccactttatgtggattcaccagattgatttgtgttagaaaaaactactggaacatttttacctgatgcaaaaatgatttattcttttgaagtatatgatccaaataataaaattgacaagttagcaacagatgataggccagaagcagatcaacattgacaaaaacgtgaattatatagcgcaatgacacgaaatatagaatatggaaatcaaataacttgacaaactatcaataaaattcatttagagctaaaatctaaacaatccattttgaactttagagatcttacatataataaaggaagtaatgcaatgcatgtagctgcttccaatcctaatatttcaataaaagatgcagaagacattccaaactatacaaattcattaaagagtagctctaaaattaattttagatataaatatccttcacaagattcagaatataaaccttctaacattcctaatgatccccatacatattcaaacactgatatagaaaaaagaattaatacatatgtaagagaaataaaaaatggaacagattcaaattcaaaaactattaacttgcaagttggttctgcaactcaaactagttcaaatagaagtttaggtttgagacaaaaagtactttctaaaatactttcaattaattttaataatctttcaataaaaaataaacctgtattatttgctaaaaattcttctaaatttattaacactattcaaactccattttcagtaaatgatggagcttgatgatttggaacacaaagtagctcacaaaatcaaaatagtaatattttgggtctaacttctaatattgatcttaatacaaatgttgatcaaaataaatttggaattaaaaatataagatacaataatgatactaattcagttacagttgattatcaacgaaatacagacgcacaaattcaaactgcatttcctgaagcagtttacgcttcatttataaaccaaaaaggtgatttatacttctttggtggaaaagatggaaatccattatcatatagaaatgattatgattttacaaataatacaatgactttttatttaggttctgaacaaattccatatgatcaaagaccaaaatttggtgaaattctttcatttgtaggtgtagttgtagctccatatatagcagatggtactccatcaaatagagcttcaatttcaaataatacagatattacattaactgaacaagataattcaggttcaactatagattttagtaatatgtatttaacaaattttgttaaacaagagccaatttataaaagaattaaaatgggttctagtaattttaattaatcataaaatataaaagcagacatatatgtctgtttttatttatttatttacttatagaaaaaactcaaaatatataaaaaaccatattttttaaaatatttggctcaaaataaaaacacaaagaaacaataattctatcataatggattttattactaaaaaagaaagaaaactcaataatttcaaattatttttatttaacattgtcatttaaagtcaaacaaaaaacttttatatgctcaaaattcaaaaatatcaaaatgttgtcaaatttaattcacagtagaaaaaatgtcaatccaaacaacggatttgattcattaaataatttcaattcatataataacactgattccaatttactaagaagtataagtaataataaaaaaagaaatgagaaattaaaaaatgtatgttgatcaatataaaaaatcttgaagttaaatatcatattaaagattttagttcaaagtgttttttaataactgagtatgcttcttttattaataaaagagataattctactttttaaaacacaatagaagaacatcgaaacatatgttgattatgatttaaatttaaattaaatctcatataatcaaataccaaaatataaaaaaggtttttttgttattgtgctaattcttctttatgtatgaaaatgagatatgtatgcaaataataaactacataataaaatcatcaaattcaaataacactatctatgttcatactgtagatattgatctatataccttgcaatttgaatgatcaaaaataatcataaaattatggaatatcaaaataaataaaagcagacatatatgtctgcttttatattttatgattaattaaaattactagaacctattttaattcttttataaattggctcttgtttaacaaaatttgttaaatacatattactaaaatctatagttgaacctgaactatcttgttcagttaatgtaatagatctattcgtaatgctgtatctatttgttggagtgccatcacctaaatatggagctacaactacacctacaaatgaaagaatttcaccaaattttggtctttgatcatatggaatttgttcagaacctaaataaaaagtcattgtattatttgtaaaatcataatcatttctatatgataatggatttccatcttttccaccaaagaagtataaatcacctttttggtttataaatgaagcgtaaactgcttcaggaaatgcagtttgaatttgtgcgtctgtatttcgttgataatcaactgtaactgaattagtatcattattgtatcttatatttttaattccaaatttattttgatcaacatttgtattaagatcaatattagaagttagacccaaaatattactatttgaatttggatcatttattgctccaaatcatcaagcattatttgtaattgaaaatggagtttgaatagtgttaataaatttagaagaatttttagcaaataatacaggtttatcttttattgaaagattatcaaaattaattgaaagtattttagaaagtactttttgtcttagatttaaactatcagttccagagccaacttgcaagttaataatttttgaattttgctgtgttcctgtggcttttatttctcttacatatgtattaattcttgtgtttttttgttgctgtgtatatctagattgagaattatctatattagaaggtttatattctgaatcttgtgaaggatatttatatctaaaattaattttagaattattatttaatgaatttgtatagtttggaatgtcttctgcatcagttgcactaatatcactatattgtgcatttacgtcaaattctctattatttccttcactatatgtaagatttctaaagttcaaaatggattgtttagattttagctctaattgaattttattgatagtttgtcaagttatttgatttccatattctatattttcagtcattgtgttatacaactcacgtctttttcaagtaggtgattgttcaggttggagttcttcttgtaatgtattaattttattatttggatcatatacttcaaaagaataaatcatttttgcatcaggtaaaaatgttccagtagttttttctaacacaaatcaatctggtgaatccacataaagtggttcagtattttgagctgaattactatttgcatcagcgtaagtgtgaataacatcactatttagatttcctacgctcactgcagccttacgatcaagatcttcgtaataagaatacttgaatctaattcttttgtttttggtcttttgattactattttgagactcaatagttgaatttaatgttactcagtctttagcattaccttgcataaagactttaacagttgtggttttttcaactgaattgtgttctatttcaacattgtctaaaaatttaacattagattttttttgatctgttcaaaattcaaagtttcaagcatttgaaccattattgctaactgctccatttgaaagtaaaccaattttgtctttggctaatgcatcatttttatcgtaaaatactaatttaacaggagcaatataagtattttcttcaccttgttcatttgttgtttgcaataattcaatggattttaattttggttgtgctacttttgtttcaaataataatttattagaaaagaacttagcaatatcatctgatattctagattgtagaggttgttgctgattattttgaattgatgaatcaactaattcaactccttcaattttatatcttgtaccggagttaacatcaagtccttgtaaatcaaattctgcttcaaatgtattaggtgcagtttgagttacagttgtaggaggtttaatagtagctatggtttttgaaattttttgaaaaccttctacaccatctttgtattctttgtattttaatttaatttgttttgtatctaaatatttatccaactcaccattaaaagttaattttaattttactgaatcagcagtattagatacttgcataatatctttgatttcaaaatctttagctatggttttaaaagttttagaaacatttggtttaaatgcaatatttacaccagatgcaccttttgaaaactgtagtgattcaatagtataagattttaatttatctaaatgtgataagtaaaacttaatttgacctggattttgtggatttggaactacttgtgaatagtatttttgattattgttatcacttaatactaaaactacaggttcattaattaattgaggatcatatgaatttaatttaaaagttaattcagcactagtttcatctactgtagcattaaatgattctatatttgtaattgtataaaaatctttagtaatatttccattattagtaagaccttctactgttataccttgttttacatcttgtgaagaatttgaatttaaaacttgaatttgttcaatgctgtactctgtagctgctttaatttgatcagaattagttaattcaacatcagcgtaaactaatccactattttgttgagctttatctacatgcacttgtactactttattaattgcactagatgtttgtgtttgttctgataaagcattttttttagaatttaatttaacatttatatatcgattatttaaaaaattatcaattgtttgaaaataaattctaaatttagcttttacattattatctgtattattttgtaaatttgcttcagtagttgcaaaatcagaataattataaacaatattagttactgtagcttttgttaaaatagtggaaaatgtagctgttgaattttgttcaatattgtattcaatattatcaataattacttttttaactttgtattgtgttcctttttttaatcctcttaaattaaaagttaatatattttgattaacatttgcatttgataaatgagtacgcgatgtagctacttggaaaatatcattttgattagtttgagctagagtggattctgcaaaaacaatataggctattttgttatcttggatttggtgtcctggattttcaaaacttaatgtaacagtagctgaattttctttttcatttgtgtaagaagttgcaaattgggctttggtttcaaataatttgtcattatcttggatttttacatcaaaagtagaatcatttttttgagcaataatattaaatttatttgtatctaatttatttgcttgaatttcattttgaaaatctgatttagaattaatttcaattttttcaactacatattgagtatttacagttaatggttgattagtttgacctaatttaaattcagctttattttcttttatttctacttcagcggattcaagaagttgtaaagcagaagcacctttttttttgtaaaataattttgcttttctttttaccctagttaaatcttcattagtatcatcaaaatatgcagtaactgtagcttgtgtttcttttaattgtgaattagctaaatattttaattcttttactttagatttagaagctggtgttgtataaatattagctcgtgaagtttctggatttatataagatgacattataatgttttgattatcatatgttgtagatagaatcttgtaaatagaagcttttttatttattaatacaaattctactttatagttgccatcattatcagttgggtttaaattagtaatacttttagcggatgaaacaatttctacttcattagttgataaatttttaacatataaattaaatttatttttatcactatcttgcaaattataactagttgaataataagttgcaattgtagtatttactgctgttggggtttcatcaacttggattttgtaatcataagtagagattctaagtggttctataagtctagtttcattaatttttttatttggatcttgtgattgtttaaattgaaaatgaagttgtttaagatcatcagaagggtctactaattctatctttttaattctatatctagttccttcaactaattgattttgactagcgtatttatttttttcatttttttgagttccaattgattttactgtattagtgtgttggatttgttgttgttggtctatttgtgattttactaaaacaactttttgtgtatctgaagtattagttgtatcaccagttaaagtgaatttaactgaagaattaattatttggaaatttttctgtgataaagtttgaatatgtgttatatcttgaccaatttgtctaccatcttctgcaattctttcataagtaattttagcagatgaaccatttaaataagtatcatgtatattgtcaaatttaatgtcaacaacagcagtagtacctcttgcatctggataatctacttgaatatcttgaatagtagcaattgttggttttgtataaaaatcacgatgattttgttgatcaatttgttgatttaactctaaatcatttgctttagcatctgcttggttatcatcacctaatttaactgataaaactttataacgttcgagcacatttaaacttcttaaatcaaagtttgctttgtattgaccatttgaattagcaatatgatttgcagattttaaagttttaattgaattatctttttgtgattgataagtaattcaagcatatttagttgttaatttagtatcttctgagttaatttgaatattgatttgtccagttgaattttctaaacgctctgcttgaagagtttctacaataggttgagttctaaattcagaatcatctgaagataaaggagttgaagctgcaacatcagaagaattttgattatatacatctaaagcaatttttgtatttgctaatttgtttgcatctgcaactttagtattgtgaaaatctatagattcaattttgtaaacagcaccagctgttaaattttggtttgttggattagttgctaatgattgctgatctatttccacacttgcaacaccttcgttatcgatagttacttgttttgtaacatatggattttgtgaaggtgttcctgaagtttttttgaatttaactgaaattgaatttcctaataagaaataatctttttgtggatcaaattgaatgttaaccactgctttatgcgcactagaatctgtttgagtaactgaaactaattttgcttgatttgctgtagtattaaatactctttgatttgataactttgtagtagtttgtgttaaatcatgagctcaaggaattacttcgttgttaataaataaattattaatatgatattctgataatttatcaagattatccaaattaaattctaaagtattattactaaaacttgttggttttacttcaattatattattagagtgttgagaagttaattctaatctagttacatcttttaatggatgttcagctgtaaaattaaatctaccttccatatcatttaaagtaatagaaaatcttgcttttgtatcagcatttacatcagtagttctataattattagatttatttactgaactaataacactttgtgtatagaagtattttttatcagcattttgagtagtaaatacttgatttgtgtttacagaaatgttggtagtgtgtccagcagcatcatctacttctagacgaacaacttcgtatttgcttccttctgctaaatcatttaaattaaatgaaactgttgaatcactaacttgttgtgcttgagtggatttttcactttggtcttgattattagtacctatttgtttgtaatatagttttacttttttagtatcaattaaataatctactaatctatcaaattcaaaagttagttgattacttgttgtagataatttttgatattcaaatgaagttatagaaacagaagttcaagaagttgtaaactctttaatatgattggtttttgttgtttgtctttggtttaaagtgtcatactctttggacaaaggaattgtgatttctctttgtgggttattaacattttgaattattaatgttggatttgagtatttagtttgtttttctagatgattaaaagtaaaagtagcaacattatttgaaatatttgtttgtgttttagctgaaattctaccttcaggaccatcaaaagataaaacagcaacgtgattattaaatacttgagctggatcggtgtttaaatttttaaaattaacacttatagttgcactattttcagttatatttgtagttgcaattgtagatataacccctaaagtagcaaaatttgctgcagtaatatgtgctatattattttgagttcattctttgttatttaatttaaatacaggatgcattacattttgagtatcatctaaagtaactggtttgagattggaagttggagttattttctcaattcctacttcaaatgatttaatttcaaactgtgcaccttcttcaaggttctctaaatcagtatctgcttgataaataccatttttatttgttattgtaacatcttttgtaatggttcaattgtgatctgtattttggtttttagctgcaaaaacaatttttacttgtttattatctaaataaaaatcaatattagaatcaaaaattacactaacatgtgctgaagtagtagttattttatctactttaacatctactaaattaatttcagatattgttgttgcaaatgcactatttgttttagctgtatctgaaatattaattgaagtattacctgaatccgaaactaaaaacacattttcaataacatattcagaatatttatctaaattatttaaatttatagtgatttcatgattggatacttgactttgtgaagtaacagaaaaaacattacctgttcttacttgtttgtaaaatacttgaatttttttattattataaaaaccttcagaatcagcaaaattaatttttactttagctgaattttgttgaacctctgaaaattcaaaacttttaatctctgattgagtataaaatgatttgttatttcaatcttgtaattttaaatctggtttttgtgtatcagtaattgattcaatttggtaagttgaacctgaatctaaattatcaaaaataaaatcagctgttaaatcttgactaacttgtacttctttttcaagtgtagctgaattattagctacatttgaatctggttgagtttttttaagttttattttaattttgtcttgctgtaaataagcatctttgaaattatcaaaattaagtgaaataccaattttgtgtaattctttaatattttgataaatattaataattttagcatcttgagctaatgtttttcacttaatgctttcatcagtttctttatttatttttttatttcaaacaagattttggaaattataaacaacatcaacaattttataatcagtaaatttagttaaatttctaagctcaaattttaaagttttatttgtttgatcataagatttttgtttttgggtaaaaatagtttgatctgaaagtctttgatacactaaagttgcatcttgaatatttgctgtttttggatctgaattttcaagtgcaactgaaatatcaatttgctcttgagctaaattttcttttttaaatgaaagaacacctaaatatgtataaaactcagtttgagtgttagcatcattggttttgaattcaaattttgtatctgtaatatcagtttgtgatggatctactttaatatctactaatttatatttagttccagcttctaaatcttttaatttaaatgaagtattaagacccaatccaacgtgagttgcttctgattcaataaatgaaccatctgattctttttgataaattaattttaattttttattaattaaaaataagttagaacctaaatcaaaagatacatccacacttgcagtgttggacatgatgtcattcacttttgcagtagaaattatcacttttttatgtagagttgtaaaagtattattaggaagttctgctaatgtagaatcagtaaagttagcaagtattggatctaaataaacatttttaagtgcataagtagtttttttctgtaaattagttaaatgaaattcagctactacttcaccattttcttcttttacttgagcatctgcaaaatcattagaaataattgttggatcttgtgattcatataaaagttttacatttcttgtattgtgattttgtaattgttcttttaaaagtgattttgtataatcaccaaaaattaatttaactgttgctgaagtatcatcaaggtgattaatttcaattttttgcacaaagaatttagtagcaaattgatttgagcttaaatcattttgttttgaaactggatcaaaatttaattcaatttttctacttggatcatccactaaatgaatggaatcaagttggtattttaatccattgttaaattgaattaaactaaatttaatattgtaatcttgagctttagctggtcttgaagaaataattggtccaaaaccatctttagctgttggatcagctggtcctgtgtaatttaattgtttatattttaaaatgaattcatgtccatttaatcaagcaaataaaggggtaaatccaatattgtattccactgaattggttttggtttcaggaaatgatttaataaatactgcaacatcgacttcagtggttctaaatgatcttttagatgcatcttttgtagtttcaagtgttttatcaaataaaagttttttaacattaatgttagcagtggaactatcttgtgtttgtgccacatttgaatcatcaaaataaacaacttggttattttttaataataatttaacagaatcaacaaaatactcagttttttggaataaatctgttgcgtggaaactaatggtgtaaatatttgttttagttgaatcttttttaacaaatcctgtaatttttttacctgaaattggacttagagttaaagaagcttcttgattttcgatcaaagcaggatctagtgctgaagcaaaagttacattaatgttggcactatttgtgctaacttgatcaaattcaatatttgtaatttgtgttgtagattcaaaatatctttgtttgtcatctaatttaaattcaattccttgtgttggattgtttttatcaacaaatgcatcagctacaaatactttttgaatgcggtatttgctacctggttctaagatattttgtgaattagaaccatctaatttaaattcagcaattttagaagtaattactgaatccagtgtaaataatttaggattagtacttgtgtcatctactcttgaatattgtaatttaactctttttccttctaatgaagttttattatcatcattttcatcaaaacttaaaatcaagcttttagaataatcatcaatttggtgtgtactaatattgttgactcaaacagtgtttttatttgtttgaaaacttctttgctcttctgataaatgattgtaaatattttcaacttttttagaaacaaaggaatcaggtgcaacttgatcaattatttttacagattcaatgacatattttcgatttggtgttaagtttttaataaagaataatgctttttgatttgaaactgtagctgaatcaatataagaagttatactctcttgtgagagattttttgcttgtgtttgatttgaattagatgtagtgtcatcttcgttattattaatatttatataatgatattgtaaagctactcttttattttctaatgattttattgagtcattaaaattaacttctaatccagcttctttatttgaaataacattgaatttaatttcttttactgatgcttttgttaaaacatagttttgactatgttgagcaaatgctaaagtctttttaacttttctatgtttgtaaaaattattttgtgtttctacttgaatgtaatatttacttccggcttgtaattgagtttgatcttgaggttgaacatatctatattttcttgcgaaatagtcatattttgccaaagaggtcaatacttgctggccttgttcgttaaataaatgtacatttaaatctgcataatttaactcatatgcatcttgatcaggaagttcaaagctaaaatcaacacttttatctgtagttaaatcatcaaagttttgtttaagatcgattactttatactgaatcccttttcaattcttaattaaatacggaattaaaaagacagtacctagtgaagctccagcaatggctaaagaaacaatagctaatgcttttttcttaaaagatttattgttcatactttactccttaaataattaaataaaatggttttatgtgatggttaattaatttgaatggttctatgaattgtgtaaatttttgtaggatctattaaaaactgacttggagtataatcagcacctcacccatttccatcagttctttttactcatactcctaaaaatgttaattttttatttccaaaagtattaactttcaatgaaaaattaagtattacttcattttgatttgtgaatataccagctctaaacaagttacttggataatctgaatcatcaccagcaaaatataaatttccactttcatccataaacacagctaaagcagctcaattatttcaacctgatggtgctgaaaaattatttggtctagataaaaatactttaacattattaatttgacttgcaatagaataagttcactttttaatatataacttacttgtcaatttttgatttattacattatttgaacttgaagtattatttgatgaataactcaatgattgcgaattgctttggttagccttaataagatctattggattagagttttttcgtaaattattaaaatttccattagtaggaccaataaattcatttaaatttgtaactggatcaattaatcatctttttcttccacttggattataaatagttaaattagatgttgtgctattgtgtgtatcttctaatattttgattttacttaattctaactcagctatactagaaccatattgatttaaattaactgaatttaaatcataaaaaaaggtcacaaatgcataattatcaccaaatacttgtttgttattaacatctccaggattttcttgtcttttatagtcagcagctgataatgttctaacatatttaaatgatccactagtagtcaaaggattattaattgatattttaggcatgcgtatcatattaggagcatttagattggcatgttcatcaaaaattctaggtataactttattacctgctcacacgttttcttgagtagcattaattaatcttcgattataactactacttgaaacttttaagtcacctggattaaagtgtaaattaaaggattgactattaactttttcaagtgttaatctatcattggctcacttattttcttgatcatttgtagttttgatcaaaccagttggatcataaactgcaattgtaaatccaaataaatctctgtcataattaactgttgaagttgcttgttcaatgtataactttggtttaatttgggttttgatttcttcaccatacactgttttggtgataccatctgcattctttaaatgagatgtaaatgcgtcagaaaagactgcatcatcaaaactactagcagctactcataaataagatgcacgtacaacagaaactttaatgtctttattaattaaatttttaatatcactagcttctaaatcaaaagaaagtattttttgacttggagtttgatcaaatgaaggatttttcacatcataaccattttgtgatgcactattagtattatcttttgttcaatttaaatataaatttgtattattaaatgaaactttaattactgctttttccataaatcagtcttttgtatttccaataaattgtttatttgattttaaagtatcatttggatcattaaattttaattttaaagttgtttttcatttaccattttgatatgtagtatcaccagcagataagttttcaactgttggataatcataaatagtttggaacaatatcttgttattatcatttccattagttccgtcaatattagtattagtttgtgtaccatctaaaacagcagcatcatttgcacttggtataccaacagcaatttttcttgtatttctgttttgagaaacctctgtaatagctgttacttggaacttcttaccttcttgaatatcaactttaacatttggttgatctgttgcagatatataatttttactaatattaaattttaaaatattttttcctctaagtgatgttccaccaaatgagtcttgataatcatttcttacagttgcaaattcatctgatttataagttttattagtctcaatatctttaaattctagatgatatgagtgacctttcataatttgtgcatttaacttgttaacttctaaaataactgatgtgtttctaggattgaaaatatcaactgcttgaatatttttttcaaaatccacaacatctccagatgtttgaaaatgttttttggaagctttttctcttccttgattaaattcagcatcaaagttaattactggattagtagttgattgtgcattttgaactagatttaataaggtaactgattcaacagaataattagttcatttaactaaagaagttaaattaaattcagcatatacttgtgaatgtgtattatcaaattttacttgtgcttctacttctttagttgttgattgtggagcattgtttaaaccaatggtacttccttgtttaattgttaattttacattattagtattattattgcttactaaagttttttctctatcagcaaaaacaactttaatattagctgtgtgatccaatgctcttgttaccatattatcgttatcatttggatttgcaattggtgctaattgaatatcacttacttctacattagtgtagaactcttttctatttgcagtatttatattatatgtgttttgaattgtaggatcttgtgaaacagaaattgaatttttaagtgaaataattttgtctatttcgtatttagtacctggttgtaaatcacgtaaatcatattcaatttctaattggctatttttatttgttaaacgagatggttgagtagtaaagattatgttatcatttgcatttttataaactaatgagatatcatcatcattagttaataagaatttattatcttcttttaatgttacttttacttttgctgatgttgaagtaatttgctcataatgcaaattaataatatctgcagtagttgctaagacattgaatttcttttcatcttctgtaatatttgtagcaaatttaattgctgaagtttgtgaattaaaagtatgttctaattttatgattttatattgactacctttttgtagctgatctaaattaaagacaactttattatcacttgcaataaaattagaattagtatgtagctctggagctccagaaacagtagttccttctttgattaactggtaagttaatttcatggattgactattttttattaactggttattattatttaattcaattgtaatatttgcttgtttttcaacagtagaaactgaagaaatagatttaattgatgtattagttaatatagtgttttgaattgttggttctggattagtaatagtaactgggataacttgtaataatttagaatcagtgtttctaagtgaatcttttagttttaattgaatattagttatttgatattgttgaccatttgataaattagaaacttggaattgttgattattttgtgttaaatcggttcaactaatttgttgttgtgcttctgatttatctacagcttgataattaataaaaacttcatatttattaaaaatatttttttcattttcatttacttgtaaaataaagtttccagttgtgtcttgattttgcatatttgcactaactgctatatttacattatcaatatctgtttcaaattttttctgatcagcattaaagtttgtatcaaaattatatgcaacttgttgatttgagccttgtgtttctaatttaatttcttgaatttcgtatttttgaactttatctaagttagttaaactaaaaagaaattgtgagttagattgtttaattacattagtaacttgagttgtttgtgtttgaccttcctttttatacacaattgttgcagtatttgtaaattctttattttgagaattagctaaagttactaaaacattagctgctgtttcagatgtgcttgtttgaattttagaaattgctacttctgttttaaatatttgattattttgttgacttggatcaatatcaattagtgtagagatttgattagaggttaatccttttgcattttcttgttcttgattagtcataaaaagaccatcaattttatatggactacctgcacttagattatctaaactatactcaactgtatattttgaaccatcttgagttactgtatgtgattgagttgaataataagaattaccttctaatatagctgtatattttaaatatagctgtatatttttatcttttaagaatttatctttagcatcgaattctaatttaactttggctttagaaattttttcttgattttgtaattgatttgattcatctattatttttgtaattgttgcatattttgcactagtagtaaattcttgttggaataaattatgagaattagaactagtttgggtttctttttctagttttaaatctttttgattttgttttaggcgaacttcagctacttcatattgagtatttttatccaaattatctagtgaaaaaatagccctactactactactactactactactactgataactaatgcatcttgtgactgtagcatttgatttggttcatttttcttatgaacttttaaagataatattgaaccattaaaaatacctgaagtgtcatttaattcaacttcaactcttgcacttgtatcacctacttcatttagtggaattaaaatttgtttaatagaagttagtgtggtaaatattttttgagttggtaaaacacttggaccaaattcaattcttacattttctggattataagcattaacttgttcttgttgaaaagtttgtgtttgtgtataacgaattcgattaactttttgaccttgttgatattcaatggatgtaatctcatattgaccaacttctagatttggtaaattaaattttgctttgtatgtatttgtttgattatcttttgttgcagtagcagttatactagttagggctgaagaagttttacttacatttctgtattttaattctactttagtatactgatctaagtagttattatctgcagtattaaaacttacttctaaattcgctgaattagaagttatagatttgtattcaatattagtaattgattgagttttaggtatagttttaaaaatttgtcctgttttttctgattgcaataaagcactttgattagttttttgaagttcttgatctaaattttggtgttttttctcaaaatttttaactaaatcactagttgggataaaaattgaatcatcattaattgttgcattatttttatcacttggttttcaatataatcccaaaattttatagttttggtatttatctaagttagataaactaatttctactcttgagttcttaacttcaaattcacttgagtgtaattcctgcccttggatttgttcttgttggttagaaatattaactttttgatattttaaaactactttgtgtccttctaattttcttggtgtatctttgaaaaatacatcaatgtttcaattagtttctgagttaggatctgatttattttcaattcttgaaactgcaggtaatgtaccaaaaattttgttcttttgcgaagtatcatcaaaagaaatttttaaatctgaagtattagtttgtttagtatatgaaatacctgtaacaataatgttagatccatatggtaaattacttaaatctgcttcaaattttttagattgttgttgataaactaaattagcactttgaatttgaccacttccagaagctaaatatcttagctgtaagtgttgtgaataagtattatttgtatttaaaaatgaatcagcttgatcaaaagatactaatactttagcagaattatcagtaactgaagcaaatgataaactacttgtagttgcagtagtaggcattacatgaaatgttctttcttgttcagttatagcgcttcctggttgtccattttgtccaagttttcaaagataaaaagaagtaaatgtagctgttgtacgcctagtacgacgtgctgtaggtgtagcatctgttcattctactgattttataacataagtttcatctttagttagatttgataattcaagttttgcatttgagttaacaatatttacttcttgagactctatacttgcgcctaaattactttttctttcataagtaattcttagttttttaccttcaaaacttcttgcatctgaggagaagtttttaagtggatctttaagtgaaatgtaaatggtacgagcagtttcaccattgttaacaatcttaattcctgtaacaactggtttagttactaataatctttgttcatcagttatattacttgcaaagaatatatttttaagttttggatgatttttagcttcttgagcatttgaaacatcttctattttaactattttgtaaatagttgctggttcaagattttgtaatgagtgatcatcaattgctgcagttccatttgaatttattacagttgcttctacaattgtatctattgcatctttagcgtttgcttttaaagtaatttttaattttcttccaactaagaatgtatcagtagctttaaaatttaatttaatagttgctgagtttttttcactattttgaacaaaagctgttgttgtatcaattgaagaaacttcagtagttcaaggatttaaatattgttcttttttagcaatatctaaagcagtaaatcctgctaattcagtaaatttagtaccttgtgaatcatttgaaatttcaattttttcaattttataatttttagctttagttaaaccatctaaattaattgaaaaatttgaattttgaacagcaacaagattagtatctgtggtttgaatttgagctcctggattgtccttatctttgtaagttattctagcttttctattgtttaaagaacctgagttatcatataatttaaaattaattttaaatcctgtttcagttggttgttctcaattaatagtttcaattgaaggtgtaggaacaaagaaacgtttttctaaattagcttgtgaatcaactgcagttgaaaaaacaatgctaaaatcattgtttttaccatcaattggtttctgaggatcatctactaattcaacatttaagatttgatatttatctcctgattttaattgatctagatcaaattcaaccacttttttaacatcactattttgttgtacttcaactggatttgcaataatttctttcttgttttgaacatctgaaagattagtgtaagtaatttttactttttgaccttgaataaattgtgaatctttatcaaatgttaatttaactttagttgaatttgtttgtgtatctaaaaactcaactttttctactactgctttagaagcggttaccctaaatgtggaattattggtaatttctttttcttgatcttgtttagttggacgtaagatatcagcaaaactagtaggttgttttttatctgctacttctattttagttattttatactgatctgtttttgataaatcatcaaaacggaaagtataaaaaggtaaattatcttctacagttaattccttagttaaatttgtattttgttgatttgttatagtaacttttattgcttttttaccaatgatttcttgtgcgctatcattaaatcttaatgtaattttagctgttgcttcttttgaagtatctacttgaacatcttttaaagttgcttttgttgttaagattttgtgatcattgtcaacactatttgtgtaaaagataatgggttcactatcttttgtagctttttcaaaagaaacaatattatatttacttccatcgtctagattttgaagaataaatgttgcttcatcattagaaactgcttgtaaagtagttgtttgtattaataaagtacttgctgaacctaattttcgatatgaaacagttattttttgaccatttaaatatgaatctaaagcatttaattttactttaaatgtagcagagtttttagtagttgattcattagtaattgaatcaatatttgctgtttttggtatggtattaaaatattgagatttttgtttttcttgatcagtagttactaaatcttttttaaatggaacgtatttgtgattatttgcatctgctagtgttgttacttgagtttggcgtggattatcaacaatttcaagaccttgattttcgattaattggtatttaccttttttaactaaatcagttaagttaaatacaactctgttattaataattggagctactaatgaacgttgttcttgttgtggttgatttaagatcacaccagtttgttccattaatttataatttaaaactgcgtatttgtctttatattcacctaaagcatcagctaactggataacaacaccaattgttctttcaatatcatttttatagctaatatctaaaatacctgatgaagtaaagaaagctttatcagttgttttaatatttttatcaaataatatttgagttaaaagtgcagaatctttattagtatttgtttgatttggtgctaaatctgattttaatttaatactattaacaatatatttagtgcctaattctaaattagttgctttaaattcaagttgtggaatgtcagggtttgttattggttgttttaatgttgtttctacttctttggtttcatttgaacctaatttgttgtatcttaaaattactgttttattttttaagatatcagttgcatttttagaaagtgaaactgtaattgtagaattatcttgatcacgatgtatgttttcaattttagtaacactaattgtttcagctacagtggagaagaattttttatcattatctaaagctgtagatactgctaaaatgtctttatcttttttagagctagtgtaattatctagaacttctactttagtaatttgataaattcttgcacctgttaagtttttaatttctaaattgtttataccattttggaaaatggttgcatccacagaatgttcttgtgtgtcagcggcattatttgttgcgttgttgtttccaccataaagtttgtaatatactttggctctaatttttttgtttttgtctttagtaaagaaggaatttggagcatcctctggatatgcattgtcaaaaacaatatttaaatttgctgatgttttattttgtgtaaatataatatctgaaattacaggtaatgtgtaaaacaataaagaagttccatccattaatggattaaatgtagtttctagattatttaaagataagtttttcttatttaagttttgttttggaactaattttaatcctttgatgataaatgcatttccactttgtaatttatctaaagaaaaatcaattgtaaacttaccatctgcttcttttttaaaatcttgataagtatcagaagttaagaagttagtttcatctttaacatcttgtgctgcaactacagcgtattgcaattgtgcttgatagtattctaggaatttatcatcggctttgaattccaatttggttttaattgcagtttctgtgttatcagaaaaagtaattttttgaatttctgctgattttacatttgttttaaatgttttttctttatcatcaaaactagaagcaaaatcaagtacttgtagttgtggttttttagtacttacatttaaaaaatcttcaacttcgattttttcaatttggtatttttgtaattttttaagattttttggttgaactcttaaaattgaaccaacaagttgtccttctactgcaagttctggttgcccatctactgttccgtcttcttttacttctttgtagaagatttttgcttttttattgtttaatgattcttgtttatccacaaattcaactgtaagatttgcagatgtttcagcttcttcatttctaatgctttttactactgcttgagtgtaaaaattaaagactttatcattatctagtctaacattaacttctttgttatcttttgtataaattctagaaattccaaatttaccaccttcattcaagtcggtaatatgaatattttttatctcataaacatttttggagttatcagcctttttttcaattgttagatttggaatagctctaaaagcataacttccatcttcgttttgtcagtaatattcaacaattacttctttggcattaattgttggatcaactgtttcaaaaattaaagaaatatctgcagtggtagatgtcattgcagtttgttcaatttgagataatgttgcaaaaggtgctgaagttgaaaataaatttgaagctttagatgagaaatcaattttttctcagttagatggaatattttccaacgctttgtctttaaaataaacacctaaaatttcataatcagatgctctttttaagttatctaaactaaattcaacaaaatgattattttttctgttatcagttgtagttaaaacttgagttaacttagtagaactctttgcttcgtcagatttttgtttatattcaactctaatttctttgtcttttaagatatcttgttgatcagaaaatcccaatttaactgtagaagaagaaagatgtgttgaaaataatgaaaaactaatttcaggtttagtaacgatgtaatttgcattttgactaaatacaaaatttactaaatcagattttctatcacttagatttaacaatctgatggtgtataaactaccagcgtctaagttgtttgtttcaacactaaatttttgtttgtgttctaatcatttaactgctttttgttctctgatgacattattagagtctaaaaagagcattacaaatgattgatcaacattttttttgagtttagaaattaaacctgcttgatttgacttaagatcaaagttaaattcagctgaatgtcttgaaacattaaaagattcaaaattctctacttgaacttcactaccagtagcaattttgaataaaaatggaagtgatgcaactgatgctcctaagagaactccagttgctgctattgttgttctgagttttttacttgagttttttatgacggttttttttgacatattttaccttcttattaatgtttattaaattgttattaatgtaatagaatttgtaaactcatagtttttttaattttgactactatttatattcataaaattctatcataatagcttgctaaaacaaggactttgccaaaaaaaaaaaaaaagcaatgtcaaaaaagttttattttcaagcaaaataaacaaacaaactgattataaaaaacatttaaaaaatgaacaaatgaagtaatttttactgtttttttacttctttatttgtttattttgctcgaaagtttataattaaaaaactatgataaccttaaaatttattcttgcaaatattgaattagtaaaaacaaaactatcacatagaaattttgataacaaaataatcgatgagattgttgactttggaagtaagaaaaacgaactattgctaaagctcaatgatttaaaagcaaaaagaaatgaattttcagatcaaattggaaaattagcaagagagaaaaaaccaactcaatctttaaaaaatgaagttatcaaaatcaacgagcaaattagtggtattgaatctgaatttaatcaaatcgaaactcaagttaaaaatatgctcctaagaattcctaatttagctttggatgatgtaccaattggtaaagatgaaaatgctaatattgtgcactcatattgaggagaaattgaacaaaaaagcttcaaaatccttcctcattatgacattgcagctgaattagacatcattgatttcaagcgagctgtgaagctttcaggtactagatttgttatttacaaaaacgaaggtgcaagactagttagagctttgatgaacttaatgatagatactcatcttgaaaatgggtacaaagaaattttacccaatactttagttctagaacaagctctatatggcactgctcaactacctaaatttgctgaagatctttacaaaatcaatgattcaaatttgtgacttatttcaactgcagaaattccaataactaattatcacgcgcaagaaattattaatttggaaaaaccaattaaatttgtaggttattcaaaatcctatcgttctgaagcaggaagcggtggacgtgatacaaaaggtatcattagaatgcatgaatttcataaagtagaattagtaaaaattacttcacaaaaagaagcattgtcagaatttgaaaaaactgttgatgatgcagcaagaattttaaaattgttaaaaattcctcacagaagagtaattttatcgtcaggtgatatgggttttgcttctaaaaaaactattgatttagaagcttgaatgccatctgaaaatagatatcgtgaagtatcttcaatttctatttgtggtgattttcaagcacaaagaatgaaacttcgttataaagaagatggaaaaactttatacgcaaacacaataaatggatctggacttgcaattgatagaataattgctataattttagaacagtatcaaacagaatctggttatattgaaattccggaagtattaattccatattttggtaaaattaagcagataacaaacaaataacacaataaaagtaagaaaacaaagaaggatgataatgtttaaaaagtacacaaaatatgaagataaaattaacaatgaattaaatgattttcaagaaattgctgattttgaagcagaaaaatctgatttaattgttgtaaattaccaagaaaaacaaagaaaatctgcaaaaatcttttttatatttgcattagttgttattgttttagtaattattactttaattgtttttttatcttgatttgtttctacacaaaaataacacaactaataaataaaacttcatttactaaaagtgttttaattccaaaaacactttttattttggattacgatgactaaaattgttttaaagtactttttaaaacataaaaaactatttgcactaagtttattatgttttattgttatgaatttgattaatattgctaatacgtacattattagcttaatttttaacattattaaaaacaaacaacttgaacaatacaaatgaattttaatttggcaagttgtattttttgttctaacggttgtttttgtaattttgaacatctgattgtttaataagatgttaatgaaagtaaaacaagaattacgtggtgatattattcaaaatattgaaaaatctaatgttattgaatttaaaagcagaggacgaggttcctttgttgcttcgttaaaacaggattttgacactatttttgatggtttaatgaataatttctatcaatttgttttctctataattgcaattgttattgttttagcaattttatttacacagagcactagaattagtttgataacaattgtaatgtttattcctaatataatttttccttttgtggtaaaaaaagttataaacagtagaacaaaaaagattatcaaattttttagaatttttggtgaacaatttttaaactttttagaaggatttccttcaattttcttcttaaataaaaaatatttactcaccgaagttattcaagacaaaaatgatcaatttaggaaacatattactagagaaattaggtgaattattttatttgaaatactaaatactttctttgctggatttattagtatttgtattttagcagttgttgcttattttgtttatcaacaaaaagaagattattctgtgtttatttttatttacttttttgaaattttactagtgcaacaactaagtcagtttttagcttatataaaacaatttgttgctactaaagatattttgcaaagatatagtttacaaaaagataaaaatgaagaaaaaagaagcactttagagctagattttcaatcattagaaatcaaaaatctcaatttttcttttgataaaaaagtgatttttaaagatttcaactttaaatttgaaaaaggtaaaaaatatgcgatttcaggtccttcaggagctggaaaatccactttaatttctatattattaaggcaaattccactaagcgatgaacaaggaaccattttattaaatggtcaaaattatcaagagattgattttgatactttcaagaacactatgacttttttagattcaaaagagtttgtttttaatacaagtatttataacaacgttagtttttgagaacaaaatcaagaacaaaaagtaaaagatgcacttgaaaaagcaagttatccagttgaagatatttgacttgaattaaataattgagatgcaaatttatcaactggacaaaagcaaagaatcaacattgcccgtcatttttatagaaacaaaaaattactaattttagacgaagctctagctaacttagataaagaaaatgcttcaaaaataaagcaaaatttattcaacgacaaagaattaacactaattcatatcagtcatcatttagatgctgatgataaatatgaccacataattaagataggaactaacaatgaaaatattttggaaaaaatataaatttttatgaattttacaagtaattgttcttttacttgtatctgttggtactcttttatctggttattattatggaaaaatggtgcaacaaattcaaactgatgcacaaaataactcttttaatacaggttgatccaaattctttattatttttattactttgctaggaattcaactgtactcgtttttaatttcatttataaaaggatatattcaaagtagaattagatttagaatcttttcttctgtttctttagaagtagcacaacgttttgaacaagcaaaatccactgagatcaaaaaattttcagaaagtaaaatgtgaaattatttatttaatgatgcagatatttactttaatgaaaatattttgaattgaatttcgtttttaaataaaatctttgatattgtaatgactatttttgtagcagctttaattaattcaattttaattgctgcttttctaggtgtgttagttgttagttttttcctttcttttactttccaaaagaagcaaaaagaagcaattatcaacttttctacagcacaagaaaaactctttgataaattagcgaatctcttcgaaggttatgatagattatactttgctaataaaacatatgtaattaaagaacaaatgcaagagcaactttatgagatgtatttaagtgaactaaagaaaaattacttagaacaatttgtaaaagatggctttataactcaagttttatacgcaattaaattaatagctacaacattaattatttttgctattttttataccaaattagatgtgcaatctttaattttctttagatttttatttgatatctttttagatagcgttcctactatgtcaatgaatttaagaaaaattaaagcaagtaaagtagttattgaaaaactcaaactcaaacacattattctagatacaaatacacaaattatttcaaatattgaaaaactagaatttaaaaatgttaatttttcttatgatgataaaaataatgttttaaataatttcaattttgtttttgaaaaaaataaaaaatatgctttagtaggcgaatcaggtaaaggaaaatcaacaattttaaaaataattttaggaattgaagataattacaccggatctattttatgaaataataaagaactaaaaactattaaagaatctagtttaagagaaaatgtaagttttttagacggaagtaattttttatttagagattcagttgataacaacattgcattatgagatgaacaattgaataaaaataaagtaaaacaaatgctagaatactttaatttgactaaagaattaaaggattttcaacaatttaataaagaaaatattgtttcactttctgaaggtcaaaaacaaagaatcactcttgcaagattgatgtatacagaacctaaatttattattttagatgaagtatttgctaacttggacaaaaataacgccgataacataaaagaaaaacttttacttgatcctaacttaaccattattatggttagtcatcatcttgatgcaaaagatagaaaatactttgatcaaattattgattttaatactttataatacaaaaagctacaaaaataaagaaaaacacctacaaaaagtaggtgttttatttttcttttattcttgttcaactccgtttatttcttttggtctagaaagagtaagtgatcctgtgtttgttactaaaactacatcttcgtttctagcaccaccaaagccaggaatataaattccaggctcaactgtgattaacatccctggttctaaaactgttgaaccagcaacagaaactgatggtaattcatgaacatcaattcctactccgtgtcctgtggaatgaacaaagtattcgccataacctttagaagctatatagtctctacaaactttgtctacctctgcagctgtaattcctggtctaactgcttgtcttcctagttttgcagcttctaatactatttgtaaaatttcttcttttctagggtcaaaattttcttcttttttgaagataattgttcttgtaatgtcagcaatgtaaccttgataacttgcaccaaaatctatttttaaaaaatcattttctttaataatcacatttttaggatgatagtgaggcatagctgcattagcaccagttgcaattattgaatcaaaagattctttatcagcaccatatttttttaagaagaaatttaatttgatatctaaagttttttcagtgtcgtttttatttatgtgtttgagtaattcttcgtatgctcttaaagatatttttactgctttttcgattttgtaaatttcttcttttgtcttaataagtcttaatttttgcgcattgatttgtacaaattctgcacttggaaatcaagcttgaagttttttaaaatcagctaaagttaagtattctttttcaacaccaatttttaagtaatttttactacttacaaaatcttttaaattagctgctgtcaataaatgaacttgtacattttttgcatctttttgagcagcttctatatatcttgaatcaacaaataaatggatttcttctttttcaagaaacactattccatcacttgtttgaagattagaaactcataatcttgtttgttgagaaaatgaaattattgcatctaaattgtgttcttcaaagcttaagtctaaatattttctattcattttaaattattttttttctttatgacttgtatgtgcgttgcatttgtggcaatgttttttcatttctaatttttcagtttgtgtttttttgtttttcttagtaatgtaattttccattttacatttttcacatcttaaagtaataccttctcttggcataataaactcctgtaaatttatttattgactaaactctttcaagtttaataatgtcttaaattatattatattttagtgtatctaaaaataaaaaaaacacacataaatgtgtgctttaatttgcaaatttggtgctctcgacgagacttgaactcgtacgcatttctgcattagaacctcaatctaacgtgtataccaatttcaccacgagagcttctggcggaacagacaggatttgaacctgcgcgggctttgacacccctaacacgtttccaacgtgtcctcttcggccacttgagtactgttccaatagcaatataattttattacatttttaggattatttatcaatttgcttaagaaaatgcatttaattactaataaacttttacttcattttttaataaatttttaaaccaaatccttcttttttgaacaaaaaagactattacaatgaatagtctcttttataatgtttattttttttgtaatttttataatagctataactacttcaaataatataacctattaaaatagttgaaacatagctaaataacataataattgaatctttactaaattcttctcctgcaattcaaggaaagaaagaaaaaagaatgacaaatggaataattattaaagcaattatgtaaattattatttctcacaaaggtattttttcacctttttttcattttcaaattagtactgtaaagattgtaaatcaatattgaattaaataagctgaattaccactgtttaatattgcactaaatgaattttgaacttttagagctttgggaataattgtaaaaattattgtggataaaatagaaataatagctactgtgtaaattgcatttctgtattcaccatttttattttttttcgctaaactggctggtaaataaccatcttgagctaaaggagctaaaattcttccataataaagactagaagataaagttgaagaaaatctattaaaaaatatccctattgaaaataaaacacttcctgttgttcctcaaactattttataaactaaatccaaaccaaaattttctttaccatctgctaataatgttgattgactaagtcctaaaaaaattaaataaaaaacaaaataagcagtaaatataataaaaaataagattactaataattttttaaatcttttggttttgacatctttagataaccctgcaagtccttcaaaaccaccgtaagcatacataaaattaagtactgttttagttaaaataacaatggaaaatggctttgaaacatcgctaatattttctataaaactatttttttgtgttgagataatataaattatcaacccaaaacctacaaacaaagttaatcacttaattgctgctgctgcaaaaataaatcgagaagataaacgaacaccaaaagtggcaatactaatcaataacacatataaagcaacagaaattattgtataaatgacttcatgagcaggatcaatcgaggtaagaagagtcgagaagaaaagtggtactgttgaagcaaataaaggaatttgaacaaactgatttcaaccttggaaaaagctcattgatctaccaaaagtttgtttcgaatatgcataagatgaaccaacaagatttttgtatttatttcctgcacgagaaaacgaaagtaaaacagctaatgtgatcaatgaagtaagtgcaaaaacaagcattcctcatgcacctgttaaaataacaccagaaattgtggctataaaaccaaatcctacaatgtaattcaaaccaaaaaataaaaattgtctttcattgaaataattttgtcgatttgttttaaatttgaaaaactttttaatcactttttattcctccactagtttaatattatattctcttagttgttgatcttcagttaacgttggtgattttagtaataaatcttgacctttagagttaactggaaaggcaataacatctctaatagattcagaatttgttaaaatcataagtagacgatccaagccaaaagctatacctccatgaggcggaacaccatagctaaaagcttttaataaaaagccaaattggttatttgcttgctctttacttaaaccaatggtgtcaaaaatttgttcttgaatttgttttgaactaatacgaatggagccacctgctacctctacaccgttgagcactaaatcatatgcttgtgctcttacttttagtggatctgtttttaataaatctaaagtttcaaaagttggcattgtaaaaggatggtgcgcagctgagagtttttgagtttcttcatctagttcgaacattggccaatttactactcataaaaatttgtattgatcttgcttaattaaattgtaatgttgcgctacggcaactcttaaagctcctaatccttgacaaactttttcatattcatcatttacaataaataatgttcctgttttaaaattatgttttttaacataagttttgattgcttcaaaagagttcaatttaaaagaataatgaacaatttgccaatcttgaatatgaacgtataataaacgatttgctttgttttgaatcactttttcactaaagattttgtattcttttttatctattaaaatgtcttctaaaaacaaggtttttgtagtatttttttcaaataaagagtcttgtgcattgtttaaatcattagcagctaataaaaaattatcaaatcttaaatctggtttatcagaaccaaatttatcaattgcttgatcatattctaaaattgcaaatggagtgctaatttctatttttagtttgttaaaaagataaacaattaattcttcaacagcttttctaatagattcaattgtcggaaaagctagttcaacatctagttgtacaaactcgtattgtctgtcttttcttaaatcttcatctctaaagactcttgctatttgaaaatacttttcaaaaccagagaccattaataattgtttgtatagttgtggtgattgtggcagtgaaaaaaagtgattttttcttcttgaaggtaccaaaaagcttcttgcaccttctggtgttgatttggataaaattggagtttcaatttctataaagtttttttcaaagaaaaatgaacgaatatagtagaacaatttgtttctaaaaataatattgtttctaagtggttttcttctaagatctaaaaatctatattcaagtcttagatcttcatttgcatctatttgatcctggattggaaaaggaagctctgaagctatggaaaatactttaatatcttgagtaataatttctaaatcaccatttttaatgtttggatttatatcttttctcttacgtaaaatgccttgaatttcaacaacagattcctttgttaatgaagaaaaaatggtttttaaatgatcattagttaaatcaataattacttgtaaaattccataataatctctaatttcgacaaaagttttgtctttgaattttctaatattattaattcagcctttgattgctactttgtgatttactaacttagataaaattgtttcattagtgatttggtggtacatattgcttccttattacttagttaaataatttttctagtttgtttaatatttctttatcttttaagtcttcttcgctaatttctatgttttttagtgtttgactatttttaattgttcatttgtcttgtggttgatttttttctttaaaaatcaagtattttgcttttcattttgttgaatttttaaatgctttagcaaaagaattgaacaactttttattaaaatcaactctaaaatttaaaaaccttaaatttgaaactagttttgtaacattagcaatttcttcttcatttaaagctaaaataaaaaaatccaaaaaaaattctttaaaaagttcatcattattaattaaaatttccgcgattctatcaactcctaaagcaaatccaatacctttaagatctggccctgcaaaacgagtaaataacccattataacagccccctgctaaaattgttgatttagttcctaaatatttggattctgaaacaaattcaaagactaaattatcataataatcaagtccacgaactaataaaggatctacttcgaaattaatattgttttgttgtaaaagtctttgtatttgttcaaattcttctttttgttcttgagtgtagaaatcttggagttttggagcttgtttgacaaattctttatcagcgtcttgtttttcatccaaaattcttagtggattaacatccaatctagtttgtgaaataaaacttaattgatctttataatttaaaagatatttttttaaataatcagaatagagatttctttgttcttgtgttgctaaataattgatttttaaagtagtatcttttaataaatctaatttagttagtaattgttttgcaaaatccaatacttctaatttaattaaattgctatctaaattaatatactcaattcctgcttgataaaattgacgatttcttcctttttgtggtctttcataacgaaacattggaccaaaatagaaaaatttattatgttctaaataaagtttattttcgttaatagcacgaattactggtgcagttccctctggtctcaaagctaaaagacgatcatttttatctttgaattcatacatttgtttatttactatatctgaagattgaccggaagataaaaaaatgtttgcaaattcaaaaattggtgtttctatgtattgaaaattaaaactattagctacttgaaaaaagctatctcttatatgtaaaaatacttctttttttttgccaaaaatgtcttgagtaccttttggtttgtagttaatatttgtttttgaatcatcatttagattaatttgttgtttgttcattaaagcacctaattatttgttgtaatcattaatgtttgcaaaggtttgttcactaattttttgcacttttcagtatccaacatcaattcttttggattttcttttgtttctttttgtttctaatttgactcaaattgtagttgcaataaataaagaagaaaatgttccaaatacaacacctacaaacattgcaaagctaaagagaatatcaatagaattgtagaaaatcatcaacacaaaaattgcaaaaattgttgataatgaagtcagaattgaacgtttgatagtttctttaatagcttgtgttgctattctttttattcttgcttgatcacttacttcagtatatggtaattctctaaatatttctttgattttatcaaatataacaatgatgtcattgattgaataaccaataatggataacagcgcaacaacaattgtaggtgagagttttatgtggaaaattataaaaataaagacaaccattaagacattaaataataaagaaacaatgattgctaaagagaaagttcatctaaatcttataaaggcaaaagtagttacaaacactattgcaacaacaactgataaaatagcatttaaaactaaacttcttgcttcttcatttgaaattgaataagttatgaattttaaattagaaaatttagaagataaagttgtgtttaaattttgaataattgaagtaagatcttgttgtgtttttatttcaatattaaagacactattttgtgcatctagtggatgcattactatttgtgaagcattgtttttaattccttgactttctaagaatttaattatttcttcacctcgggttttatcaattagattataagttggatcttggttttcaattaaaatatttgttccaccactaaattcgattgaaagatttaagccgccagcaacagaatgattaataccagcaaagatagcaaaaagaagcagagctagaataaacatcactagcggaatccaacgtgtgtacttattaagagctaaataatctggtttttctaaaatagaaacataacctctttcatatttttttacatattttggtttgattcctaataaataaactcgcttgtcaaaaaatcctgtttttaaaacaagtgatgtcattaatttggtaaaaagcataattactaataaagtaaaaataattgaaaaaattaaagtaattgagaagctttttatgtttttggttccaaaaaagaagagaattattccagctattaaagttgtaatattcgaatctaaaatcgtgcttagtgaagatttatttgcatatgcatttgacttattaaccgtgtggcctgaataaattttgcttttgagaatctcaaaattaataatgtttgcatccacattcatgccaattccgattattaaagcggcaattgtaattggtgaatattctccacgaactacagtgaaaaatagtaaagttaggaagatatacaaagcaagtgagatagtagaaagaacacctaaaagtccataatttactatcataaataaagaaattacaacaatagaaactataacagcaattcaagctgaagtaaacgctgaatctgatttagtttgtgaaacaaaagaagctgaaagaaaatcgagtttgtaattagctgttccaaaattaatgtttagagctaattgtttagcttcagctgaagaaaaattaccatttattacaaatgaagaaccattaagagcttgttgtactcgtgcatcagaaatcaagtatttttttgcatcaaattgatattgttttaaaactggtgaagcaggttgattattttgtaacggcgcaggtgttgaattttcatttacatgaatgaaattaaaaatattttctttagcattttttcactcatttggatattgagtttttgctaaattaattaatcctgaaatatttgatcaaattaaaatacgatttttaccaaaaggttttttggaaatataatcagttgcttttgatcattcaagttctgcatctttgtcttttaattcaatttggacttcattttgtgaaggattatttggatttggacgagcttgtgctgattcagatttaaaaggaggagctcaatttatttcacttccgtaatctaaagaaccattagttacaaatttaccatcgtaaaacaaaggtttattttcatcatcagtaattgtaagtaaaggttttgtaacaatttcagaaataaaagcatctagctttttattatcagttatattatttctagaaattcttattcttccttctccttcaatagaaacactggttccgttaagcccggaaccacctgttaatcttgtaaaaatttcttcatctgctgttcttactaagctttgacttggtgctttgttatctaaagttttaacttgaactaaaacctctgctccaccaccgtattcaattgatttgttaatatttttggaaatatattgttgacttgtgtaagagataacaaaaacaatagtaaaaaaagataaaaaggcaataaatcacctttttcaattattgagagtgaagagtttccttaaaaaagttttcataattttgtctttgccattgttataaacgtttttaaattatactaaaaacagcgattattcctaagtattttaattttctaaatcaaaattattctacaaaaagtaaagaaattttttaaaaaattaaatgttgttataattttaagatatttctagaaaggaaacaatgataaaaagtaattttaaaaaagacaaaattttcttcttatttataggaatttgaattttaatatctactttagtagttttcattattgaaatcatttatatcaaagcaagagatcaatatattagaccaacggggattgattttagatatttttttggtcatttcagtccttttatttttttcacttatcaatcaaactttatgttgtgtgtagcttgttttcttatttatagaaaatttagttctaaaattcaacgactttattttgcgtttacttctttaattaccattacatttttagtttattgagctttactttcatgaaatggaaaaacttgacaaagtgcagatacggctataaaatccttaattacacatttaataaaccctattttaggttttattggtttatttttaattcgtaaatccattattgtggataaagcattatttttaagaagtgctttttatgtttttggttattttgtttttgctttaattatttacttactaagttatggaaaatatcaaataaagacagaaacctcaacagttacaatctgagatggtggcacaatatactcatttttaaacttcaaaaaacctttattttataaagatggaaacattggaatagtagttattttagatattgtaatgtttttaatagctttgtttattccttttgtttgtgcttatttttgaaaatgagtatttagaatacaaatgacacaagaaccttttttcaaaaagaaaaaataagaaaaaatgtagcaaattgagcagatccccttttcctagaaaaatagaaaaggggattttttatgaaatattcattagaatttaaattagaatatgtaaaaaaatacaaaaaaggaattgaaattaaaaagcctgattttgctaatacaagtcaaaaaaattttttaaatcaagtaaatttttgagaaaaaatttatgacaaattaggtgttgaaggtcttaagaaaaaaccacgaaataaaaagtgaactatagatcaaagattaaacatagttaaaagatttttagctggtgaaccaattgttaaaatttcacttgaaaataatcttaatccaagtcaaatatctttttgagcgaaaaaatatttagaatcgggaatcagtggtttagaattaaacaaaggaagaccaataatgaaatctaagattaataataataataataataaatctacaaaagtatcaaacaattccgatagtcaagataaaatggaattcttcattatctgtatatgaagaacttaaacttcttagagaagaaaataaacttttaaaaaaggaaaattaagttctaaaaaagtgaaaagccttggtagagatctttgactcaaatcaaccaaggcaagaaaaaataaaaaatttataatagagtaaaagctgataaaaacttgcaattaactcaagtattaaaagagttttctattcctatatctactttttattatgaactcaaaaaagaagattttgacaagaaaaatgaagaaattataagccaagtaaagcttatttttgaagaaaataaagcaatatatggaaaaagaagaataaaagctgaacttaataatagaggctataaaattggatttaaaaaagttcgcagattaatgaaaaaattcaatctcaaagcaatttgttctagaagaaaatacaaatcttaaaaaggaacagttggcaaaattgcagacaatattttaaatagaaattttgttgctactcaaccaaatcaaaaatgaactacagatgtaactgaatttagcggaccatttggaaaagcatatttatcgccaattttagatatgtttaatggcgaagttattgcttgagatttgtctacaagcgctaataaccagcaaattagaaaaatgcttcaaagagcattttcaaagcacaaaaatcttgaaggtttaatttttcacagtgattaaggttgacaatatcaacataaacaattttcagaaaaattaaaacaaaaaggaataactcagtccatgtctcgaaaaggaaattgtttagataatagcattattgaatcgttttttgggacattaaaaagagaatgtttttatggtcgtgaaaaagaatttttaacttttaaacaacttcacaaagcaattgcaaattatatttattattacaatcacaaacgaattaaagacaaaataaaatgaatgtctcccattaaattttgggaaacattcatttcaaattataattaattaaaacactcaaaaattttttcaagaaaaggggatatgttcattttttttgtttgtgttttttaaaatctttttttttttttttttttttgaaataaatttattaaataattgatcacttacataaaaattaaataattcttttaaagtatattgtttttttgtaatttacatttattaactattttataaattacttggaatatatatatatatatatatatatatataattactaagaagtattttctataccaaatagaaaaaacttaaaaaaatcaaaaggagaaaaattatggaaccaatttttgcacaaccacattatgcaaatgcaattggtggaattgctattgtatatttattattagtaatttttacttttatatgctttgtagttcttgttatatcaattattaaatttctaattactactacaagttataaaaaatttcaaattttagtgcttaaaaaagaacatcctgatcttgcagaagaatttgaaaatccacaatcaaaaaatcttagacattaacaagacacatcaaataaaaagattaataaaaattcatgaattaattaaaaaaccttttattattttttaataagaggttttttaatcttcattattattaaatcctagataagtcaaaaatgctattttaaataattggttttctaactctgcatcagaaatagaaaaatctataataatgagcatttccccttttcttagaaaaatagaaaaggggaaatgctcattttgaaggattttttttattaaaacttacgatttacagttgtatttaatcagttgtaaatacttaataatacttttaaaaattaaataatttttttatattttccctaaatctttcattactttttctatatcagtttcttgaaataatgtaatttgctcttcttttttaatggcaataacactgatttgagctcctttgttattttcgattctagcaattaaattattgctattgctatttacaaaatatagttttttaaatttttcaaaatctaaatatcactgacccatattagaagaataaaggttaaaaaagcttaaattaagtttttctactgctaaatataaattatattttgacaatatattttcaatgctttgattttcaaagaatttatttatatatttttctaatactggctttaagacattagaatctagtttattaaattcatttacatttgttaatgtaaaagttttaaatttattctgagcaaaaaaattatcaaatttttgtccattttcttttattgaattgttgtttatagttgaatcagcaacaaattcttttacatttgaatttaatttatcactactttttaaagtgtctttaaaaattcaatatgaattcataaaatattttttttgatattctgcaaagttgtcttcgctttttttaagaaagaaattattgaaataattttttaaaaatgattgttgataagttttggtttttaataaatttaaatctattttatatttttgctcttgcggaaaacgatttcacaagaataaagctacactactcatcgaaattgtaaatagtatcaaataagctcataaaactaacagtgagattttgataggttttgttattttagttcttttttcttggctaatatcattagcaaatcaagaaaactttaattttcatttgtttttttgtctcaaggtagccccttccattcttgtaaaagagtttttcaatctgtttcattattaaagacaatattgtcttcttttttaaaggctattatacttatagttgcaccattattggtatcgcttgactcttgcagtcatggataataatttacaaaatataattttttatctttaagaaaatctagattccatcaacccattctagaagagcttaatgtgaaattcgagaaagagctattctttacaaaataatataagttatacgtttgtagtacttgctctacactttgattaggaaaaaattttgttaaatatttttcaaatacaggttttacaatgttcgaatctaaattatcaaactctgtttctaaagttaatgtacgagggatttctttatttttgttaaaaaaatctgaatatttatctatgttttcttgaattttatttttttcttcatctgtattggattttgttttttggatgtgagaatcaagttggtcactactttctaaagtatcttgattaactcaataagtactcatgaaatattctttttgatatttattaaaattattttgaatttttttaaatataaattcattaaatgaattttttaaatagattaactgtttttcttcttcatctgatagattaacatagttgggttgatcaagtttataatataaacttaaataataaatggaaacagcagatatagaaacagaaataattgttgataaaagtaataaaattttcttcgttttagacatattttaatcctttcttacagtgtacaaatttttttaatttattgaaaaaatatatttaaatttgcattttccttcatttttgaatcaaattagtaaatctggaattgtaatatttcaaacaaattgacttactactaaatttattttttaaatttttaattctagctaatttagaaaatacgaaattatatttaaatcaatttcataatggtatctatgttgctactttcaaaaaattctatattttcagattttttaaaagcaacaatattaatttgtgcgcctgtatatggaaccatagtatgaactatgggacgttgtggaggttctataaaatatagcttattgaattttaatgaatcaaatcatcatcaacctaaatctgtttttgaaagaccaaatgaatatatttcactttcttttacaaaataatataaattatattgatcaaaaatttgttctatattttgattaggaaaaaatttacttaaataatttttaaaaataggttttaaaatatttgaatctaaattttcaaattcttctttggtttttagtgtgttattagtagccttatttgttttaaaataattatcaaatttttgttgattttcattttgaattctttgttcattttcacttaaatttgatttagagtaaaattcggatggaaatggttgctcaactttatctaaatatttcagcgtttctctatgaagtcaatatgaattcataaaatattttctttgatattcttcaaaattatcattaattttttttactacattattatcaaaaaaattatctttttcttggtttaaaaactctttatttttgcatgctaaagtaaacaatcctattgttggaattaagacaacacttgataaaattttgcgaatttgcaaagatattttcctctttttattcatattagttttccttaaatacagtatgtgtcattgcaatagaatcatctactgaattttcaaataaagaacttttgtattttttaactatatatctataaattccagaatcttgaactttaaatttaattaattctacattactgttgatacttaatgatgaacttacactttgtcaatatcctctactatctaatttttctaatactaaatcatagtcagtgaataaagtttgattttgacgttttttagtttcttgaagtttcaatctattttcgtttatatgtttactttttcaatcacttagttttagttcataatcaattccctgagcagtttgttttgcaagtgctcatgttggaaataatcattctcatcaatttggatgttgtaattctggtttattctcgttttcttttagcaatcctgagttaaacattcaactaagtgctatatttatttgttctccagcttgtaaatttaaatgtgagctttcgaatatgacgccatccacatcggatttaataacagatttagtattaatatttcaagctgcttcttgcattttttcaacatctattaaacctgctccataagttgaatcaaaaccatttccctttttatttaaatttttgtatttaggtaaatgtgcagaggcagctagaatagacattgcagatggtaccctaaattgatcattatttaatcaagaaaatttatcaaaaatatatgaaatagcaccagtaactacaggagcagcaaaactagtacctctgatttcaccattattctctaagagtatctcccctggtgcaacaactaaaggtttaggtaagcttaaatggttagactctagttctctgttagaaaagttcgaaatttcaatgtcatttaaaaaagagttttctctatattttgttgatccgacagaaattgcattatatgctaattgagtgctgtcaattcatttgccttttttattttgtttgttatgaccatttccagcagcgaaaacattaactacaccatattttcttgaaatatagtctatgaaaaaactatcatcattataagggagagagtgatcagcagtgggtccataactatggttaataaactttacattattttttaaaaccaatcattcaagagcgttttgtcaattaaagttattagaactaaaacttgtgaaataaatttgtccatttgaatttattccgtttttacctgctgcaaccattgatacatcagtcccatgtgtatcatttaaattttctggagtaaataatttaacttcaggtgtatgtacaaatttataatttctttgtaattgagttgtacctacttctaaaattcctatttttgaaccttttctgtgatatttaaaaaattctgtttgcttttcaggatttaaatttatttcttttaaaagtagttttttattaatgtctgaaaatctagaaatataatagccattatgttcattttgggaaactacatcattatttttgataataacttttttataaaaaacaattctttttacaaaatctaatgtatctacatatttgataaattctttagatttttctacatcattaaagtaaaatcaaacaataggtagcattgcactagtttgaatttttcaatttatgtttttgtttttaaagcctctttttattttatttagaagagaatctattctttcatctaaatttcctttttcattaaaaacatctaaatatagttttaattcaattgtatcagataccttgtctgataatttttttccatcagtagatttggaacttagaattttccaatcattaactacaaattttttacttgcaaaatttattgttgctaatttttcattactaattaagtttttattttgattaaatgaaaaaataggtataaaaactaacgaagttattgtacctatcgcaaatgaaagtttaaaaaattttttaattttggtcatatatttctcctgttattaattttttattaaataaaaacaaaatatataaagaaaattaaattttgaaataaatattcaaattattttaaaccaaatgtatatggatttttttcttattttgtcttcttttttagatttgtttatgttatttttttaattcttgttttaattatctcattttttaaaatatttaattaaattaaaaaaataaataatttttaagtgttattattctttgaatttagattagtaaagttttttcataaaaaataaaatcacattgatcatatccccttttcctagaaaaatagaaaaggggattttttatgaaatattcattagaatttaaattggaatgtgtaaaaaaaatacaaaaaaggaattgaaattaaaaagcctgattttgctaatacaagtcaaaaaaattttttaaatcaagtaaatttttgagaaaaaatttatgacaaattaggagttgaaggttttaagaaaaaaccacgaaataaaaagtgaactatagatcaaagattaaacatagttaaaagatttttagctggtgaaccaattgttaaaatttcacttgaaaataatcttaatccaagtcaaatatctttttgtgcgaaaaaatatttagaatcgggaattagtggtttagaattaaacaaaggaagaccaataatgaaatctaagattaataataataataaatctacaaaagtatcaaacaattccgatagtcaagatcaatcaaattcttcaatatcagtattggaaaaactcaaacttcttgaaaaaaaaaaaaaaaaaataaacattttaaaaaagagaaaaaaactttgaaaaagaaattaagctcttaaaaaaagaaaatgaagtactaaaaaagtgaaaagccttggtagagatctttgactcaaatcaaccaaggcaagaaaaaataaaaaaaatttataatagagtaaaagctgataaaaaccttcgcttaactcaagtattaaaagagttttctattcctatatctactttttattatgaactcaaaaaagaagattttaacaagaaaaatgaagaaattataagctaaatgaagcttatttttgaagaaaataaagcaagatatggaaaaaggagaatcaaagctgaacttaataatagtggctataaaattggatttaaaaaagttcgcagattaatgaaaaaattcaatctcaaagcaatttgttctagaagaaaatacaaatcttacaaaggaacagtttgcaaaattgcaggcaatattttaaatagaaattttgttgctactcaaccaaatcaaaaatgaactacagatgtaactgaatttagcggaccatttggaaagcatatttatcgccaattttagatatgtttaatggcgaagttattgcttgagatttatctacaagcgctaataaccagcaaattagaaaaatgcttcaaagagcattttcaaagcacaaaaatcttgaaggtttaatttttcacagtgatcaaggttgacaatatcaacatagacaattttcagaaaaattaaaacaaaaaggaataactcagtccatgtctcgaaaaggaaattgtttagataatagcgttattgaatcgttttttggaacattaaaaagagaatgtttttatggtcgcgaaaaagaatttttaacttttaagcaacttcacaaagcaattgcaaattatatttattattacaatcacaaacgaattaaagacaaaataaaatgaatgtctcccattaaatttagggaaacattcatttcaaattataattaattaaaacactcaaaaattttttcaagaaaagggtatcacctcaaattgctacattttttaattttgattattgttttcttcattaattgaagttttgtgtttttgatttttatatcatttattcacagtaggtcaaccaatttcaaataccataatgaccaccattccaataggacctgaaattataaatatatctgcaaaattaaaggttcctttgtcacgataaggaatgaaaatgatatctttaactccattttgataaagtaatctatctaattcatttccaatatttccagctagtaaaataatcataaaagttgcaaaaaagtaatttttagaaagcaagacactaatgattagaataaataacaaaagaaaagaaaaaatatgaataattgtaaatccaaaaaccttagctagtcctgaagttactcctctgtgaagcaatggtctaaatccaattcaaccgtgattaattacaagtttttcatccggtgcatattcattaaaatcttcgtgtttaaaaattaaatttttagttaactgatctattagcaataaaattaataaaaagacaaataagaagattgcattgtatagaatccgttttttgggaactctagttaaaattgttttaacaaaattctttatttttacagaactaattttcatttattaaatccttaattaccaaataacatctttgacaaacatcttttttaatatattttgcttcaaaatgatttcaacaacgtaaacatttaactgaattaaatggttcaactttatctttgttagcaaagtgaacttttccaaccattaataagcttttaagatctaatgattttataaactcagaatctgtttttatatggatgaatgcttcgtttgttcttttgattactccttctttaattttttgttcaattagttgatagattcgatctttaacagtgaaaaattccttccatttttcctcaattttttcatcaaatgcttcttttttaaagaaagtttctaaatgaactgattcttttttattatctgattttatatatgaataaatttcttctgtcgttgttggtaagataggagctaaggaaatagtaagtacatttaataagttatataagttatattggaattgtctacgatttggattatcgagtttatctgtatataaagaatcttttgctattgataagtaaaagtttgaaaaatcaataataaaattgtttgcttctttaataatttttacaaatctaaagttatcgtaattatcaataattgtgtttttaaattttttaattttattatcaatatattgatgaactgattctagttgcagatttggattgtgtttgtaatcttctaaattagtaattaaaaacttaattgtatttctaatttttctataaatttctacattttgttcaaaaatgtcttttgaataaacaacgtcattaaaatattcactattacttactcaaagacgcaaaatgtcagctccatatgttttaattaaatctaaaggactaactccatttcctttggatttagacattttgtttccgctttgatccacaataaatccatgcgataacaaccttcgataaggagctttgttgtagtaaatataactattaattaatgatgaattaaatcaaccacggtattgatcagaaccttctaagtacaagtcaaaaggaagctctgttttatctacttttacactaattgatgtagaacctgaatcaaatcaaacatccataatgtcgttttcttttgttcatcccaagtttctgtattcttctggaagaagctcatctacttctttttcgtatcaaacatcggttccgtattgttttactaaattgataacataatcaaataattcaggtttatctaaaacaggatttttattttcatcatagaaaacaataattggcactcctcatgatctttgtcttgaaatggttcaatcttgtctattttcaatcattgtctgaagtcttctttttattcattcttgaggaaaaataacttcttcactagcttttagaatttcggattttattttttcaatagcaacaaatcattgaggagttccacgataaataacaggtttattggttcttcaatcatgtggatatgagtgtttaagtatggaaaattttagtaattttccttctttttctaaatcttgtccaatttctttattagcatctaaataaaataaaccttcatattttcttgctaattcatttaaagttccatcatcattaacatgcatcacatgttctaaacctgtttttttagaaatccaaaaatcgtcctcaccaaatagtggtgcgatgtgaactaaaccagaacctgaagtaacagtaacgtgatgtccttgaacaacttttccttctttttccttcataattggtctgatatatttaacatcaacaagtttttcacctaaaaaagtatctacaatttcaaagtgatctcagttaaattcttgagctaatttctcaactaattctgtggctacaacaaaaaatttgtcttgatgttttacttttgaatattcaaatttttctccaactgcaactcctgagtttgcaattaaagttcaaggtgttgttgttcaaattactaaataatcacctttagttactttagaatttccttgtgaaatttcaaaagctacataaattgaaggtgaacgatgatctagatactcaatttctgcttcagctaatgcagattggctagttggtgatcaataaactggttttaaacctctataaactaaacctttttgtaccattactttaaatagttctaactgttttgcttcaaatgttggcgcatttgtttgataagtagtactaaaatcggttaataaattaagttgttcaaattgttttttttgtgattcaatttgttcattagcgtaattattagcttgttttctaagttctaaaacagataatgatttatgagaaatattatttaaagaaagaattttattttcaattggaagaccatgtgtatctcaacctggaacataaggtgaataaaagccttgcatagttttatatctaacaacaatgtcttttaaaactttattaagtgcatgacctatgtgaatatcaccatttgcatatggtggcccatcatgaagaacaaattgagggttattttcgtttaattttaaagctttttgatagattttgttatctaatcaaaactgtctatattctgcttctttttgtgaaagatttgctttcatagaaaactctgaagtgaatatatttaatgagtttttataaaaatttttatccataatttttccttatttatcaaattttttcaaaagagaatcaatgtctaattcatcaatttctttgagtttccctttgactttttcaattgcttgattaacatcaaaagatttgtttgatgtgagtttaggttgcggtatgtcttgatttttatctattattttacttcttttttcttctttttgtgaaacattttctttaagattatcttctatttttttattttcgatttttgctttttcttctaatttattatttatgttgattttaatacaatctaaataataaacaaaaggattttttaaactttcaaacttattgctaacaccaggaatctctaaacttggaactttagatactttatttggttcttcaaaaatgaagcaaatttctttatttttttgttttataatattaacaatttttaaatgagtaaacttggattctaaataaaatttagcttgactatttttgttaccgtaataaattgagctcaaactaatatttcttacaaaacctgatttagctacaaaaacaaagacatcatctgattgacctaaaacaaaatgatctatatattcaccttctttgagctttaaaattctaactccagctgtatttgttccataaattggaacttcaatttcgctatatcttgaagctctattttggttggtaaataaagcaatatcttgataattatcacttaatttagcaccaattagttgatcatcttgctttattttcatagctaaaattgtttttttgaacctggaaacttctaaatcttttaaactgatacgcttgcccattccgttcttagttattaaacaaacaaattgattttcactaaaatcagctatttcaattgctgaaattatagtttcatctttttttaataaataatcaatttgtaaatcagatcaagttgctttaaaagttgcatcttcaatagtgtgtaaaggaataaaaatataatttcctactgaagtaaaaatcaataatttattttttgtttgaattttgttaacaaaaacaaaataatctttttcttttaaacttatatttgaaatatcatttgattcaaaaactttgttagacatttttttgtataaaccttgtttggttataacaaaataggattcttcatttttaataagttcttcttgattaatttcaattttgaaattttgattaataatttgggttttcctctctcgtccaaattttgttttaatttcttttaaaattgagactaaatattgattaaactctaaatcattttctaataaagttgttaatttagctacttgatcaattaaagtatttttttcatttaaataattttgttgatcaattctagataatctatacaatctcatttcagcaattgcagtagcttgcaataatgtaaaatcaaagttttgaactaaagcttctattacaccttgtttggaattatctgaatttctaattattttaattacttcatcagtaatgtcagcaacctttaaaaaacctttaacaatttctaatctttgattattttttttcaaatcaaattcaatttcttttgttttaatttcttttaaatgatctagataataatctaacatcttataaatagatagaagcttgggtgtgtaattatgaattgctactgagttgtatgagtaactaatttgcatttgtgttttttgaagtaaataatttaaaataagttcaatatttgcttctttttctaactcaattaaaatagaaattccagttctatctgattgatcaattacgtctaaaattccttcaattttcttctcaaatctaatttcatcaatttgttttacaagttctgacttaacaactgaaaaaggaatttcttcaatttcaatagctttgtattttggttcgttaattattttgtatttagaaactaaaactacttttccttgtcctgtttcaaaagcttcatctattccttttgtatcataaataattccacctgttggaaaatctggacctttaattatttggcgaattttagagtatggagttgctttattttttaatttttctatacaagcatcaattaattctgctaaattatgaggaggaatatctgtagcaaaacctgaagcaattcctttagttccgttcactaataaattaggaaataacacaggtaaaactactggttctttttcagaatcatcaaaattaggtacaaaatttactgtttttttattaataatttccaacattaaattagtaacagcttctaaacgtgtttcagtataacgcattgcagctgctggatcatcatcgattgatcctttatttccatgcatttctactaatggtaaattcatttttcattcttgagccatccgaattaaggcttcataaattgaagaatctccatgtggatggtatttacctattacatcacccactacccttgctgattttttaaatgctttatcattttttaaacccaacattcacattgagtacaaaatccgtctttgaactggttttaatccatctctaacatcaggaatagctctttgttgaataacatattttgaatacctaataaaacgttctgatactatagaatcaagtgaattaactattaattgttcttcatttttcttcatattattatctagtttcttcatttgttatatcttccttgtcagtaaaattaataaaaaaatcatcatctaaagaaaagtgaacattgtttttaattcattgttttctaatgtctattttatctcccattaaggtaaaaattcttctttcagctatagctaaatcttctatttttactttaattaatgttcttttttcaggattcattgttgtatctcaaagctgttgagcattcatttcacccaaacctttatatctttgtaaatcaaaattggatttgttttcaataatttgttttaattcattttcatttcaagcataaacagcttctttatttttaaagctaattttgtaaagcggaggttgagctatgtaaacatgacctttttcaattagttctttcatatatctaaaaataaaggttaaaagcaaaatttgaatgtgagctccatctgtatcagcatcagtcatgataataattttgtcatactctaaattattaatgttgaaatcttgaccaattcctgtgcctaaactactaatgatagctacaatttcgttgttttttaataaatcaattaatcttgttttttcagcattaattatctttccttttaaaggtaaaatggcttgaaatttacgatctcgacctaattttgcgcttccacctgctgattcaccttcaacaataaaaagttctttttctgctttgttttttgattgtgcaggagctaatttacctgataagattttcttctcttttgaagcatcttttgattttttagattcaattttagacagctttgtgctcattctttgatcaaaagcatctttgattttattaataattttattagcttcttgttggtttttgtttaatcataatagcacttgtttataacaaatatcttcaacaactgattttgcaatttgagttcctaatttatctttagtttgacctacaaattcaagtaaaaattctggtacttttaaagataaaaccaatgttaacccttctttgatatctaaaatgtctaaagtatgtgttttgttcttaaaaattgatttttgttgtgcaaaatcattaaaaactctgaccaaagcttgttttaaacctaattcatgtgttccaccagatttagttttaatgttattgacaaaagaaataattgaatcagaataactatctgtgtattgaaaagcaatttcaacattaattttttcttgtgtttcattgattaaagctgcttgtttgtttagaagtgttttaccttgattgatgaattcaacaaaatccttgatgccatttttgaaaaaaaatgcttctttttgaaaggtaatttgatcttcaagagtgatttttaattccgaaattaaaaaacaagtttctcgtaacctttctgaaatcatatcaaaagaaaatttattttgagcaaaaatttttttatccggtcaaaactgaacacgtgttccttttttgttagaatcacctacaactgttgttctttgttctatttggcccccattgatgaactttgtttgatagtttttgttgtttttataaacatttacaatcaatttactacttaaagcgttcacaactgaagatccaacaccatgaagtcctccagaatttttataaacttcatcagaaaatttacctcctgcatgaagctctgtgaagactaattcgacacctgataatccactagtatgtttttcaattggtattcctcttccatcatcttcaacaacaatagaaccattttcttctaaagaaacataaatgttcttggcaaaacctgctaaagcttcatctactgcattgctaacaatttctcacactaaatggtgtaaaccttcaaaatctgttgatccaatgtacattcctggtctttttctaactgcgtctagaccctttaaaacttttaaattttcaactgtatatgatgacattattttcctttactttcaacatttttaaaaacaaacaaaaaaacaaattactaaagaaaatagtttaataatttatatattatattttcttatttaaaaagaagaaaaaaagagaataaaatagtaaaaaaccaagaactttttcttggttttttactattaaacttaagctgtggaaacttgcttagtttcttctgcttttgtttttaaaactttgtttttaatataatctctatctttttgctgttttttatatttaattaaatctttgtgataaacataaaatcctgcaaaaaaagcagtaccaattatgaataaaattaaaaatccaactacaattattccctcaactataaagcttttaaaatcaatatttgcagctttatagtaaatataataagctaaaattgcaataaaagctaaaaaagcaactacagataaaacaaaaaagtgaatagctgtgtttttatatttttttgcgtctaattgattgagtatcattttttcctttgataaatttagtaaaaattatacaacaatattttaataaatatttaatttaataataaaattagaaaaatggaaaaatttaaaaaattgatagaaaaaaaagactttccaaagacatttggtgtttataaattcttagatgagtataaaaatgtgctatatgttggtaaagcagaaaacatctataacagaatgaaacaatatgctgctgggcacataaattcttacaaaacacattcattaattaatcaaacagatgatattgaattttttatcactaattcaaaagcaaatgctttgattttagaagataaatgaatcaagctctataaaccaaattttaacattttactaaaagatgaccacacttatccttatattgaaattaataagaatttagatattaaattagcttacaaaattgctaataaacgaaatttttattttggaccttttgtaaaaaaatctgatgcttgaaacttaacaagatttttagaaagtaaagttaaatatgaaaacggtttaccaataaatagtttatccccagaagaaaaaaatcaaaaacttgaaatttgcaaaaagattctaaagctaaaaaatgcttcatttttaaagcaaattttagaagaagaagctttatttgtacagcaagaaaattatgtaagagctaatgaattaaaacaaattcgccaggctctaagtgatttacaacaacaaaaagaaagcattacattagcaaataacaaagatgttgatttcatttttgtcgctcagtatcaagaatttgtcttcatttcacttcttttttacagaaatggctctttattttcctacaaaaacttaaatttaagtttaatttttaacttagaagaaacatttattatgtttttaaaaaattattacaaaaataatttaattccagatcaaattgttttagacaatctctgagaaacattggattttaaatctgaattatctagtttaaatataactttttcaaataataaaaagcttgatttaattatgcaaatggcaaaagataataatcaattttttgttcaagaaagattaaaaatacttcaaaaagaacaacaaaaagaaaatattgttctagaaaaattatcacaagatttaaaagttgccaaagcagataaaattatgattattgataactctcactctaatcttcaaaatattgttacaggagttattttctttattaacggcgtacatcaaagcaaatttaatagattttttaatgtttcaaaaaatttaaaatctgatatagattttatgtatgaaagtatcaaaaaatatttttcaattaaaagttttttaaaacctgatcttatttttgtagacggcgctcagcaacaaataaaaaaagcacaacaagctttaaaggaatcaaatatttatgttcctttatttggaattgtaaaaaacaaaaaccataaaactcattatgtattagatcaaaatcttcaaaaagttgaaaatattagtcaagaatccttcaatttcctttctaatatgcagattcaagtagatgaatttgcaaaaataaagcacagaaataaaaacatcaaaattttaacttcttcctttttagatcagttaaatattgataaaaaaactcaagataaacttttaacttactttaaaacttacaaaaaaattaaagaagctaccgaagaagaacttaaattgttcttaaatgctcaacaaattaaaaaactaaaaaattattattaaaaaatttaaattgtaatcaaaatcttaatttatgttttttctaataaaactattgaatttatttttttcacaaaaataccacaaataatttgtggtgtttttgtgattattttgtaaatttattattatatttagataatttttaatataaatatttgatttttaacttttctatatattctttttcatctttaataaatggaataaatattaagttggttattaacattgtaatcaatcacaccactacaatcattactaatcctatatatatttcattcacagcagctgatgacccgacgaaaatttcactcattaaaacaacatataaaaacacaataaaagcaaatatttttgaaaacaataatgttataaattggaattttttaaaatttgtgttttgttttacaacattaaactctttttgatttttcaatccaaaaataaaaggaaaaattcaaaataaaattctattttttgttcctgagatatattttactgaaaaaaatatttgatatacaaaagtaaaaatggaaattaaaccaacagtaggaagaataaataaagaagaaataaaagttaatctacctggaggttgtggtagtatatttgcaaatatgagtagaaaaacaagtaaataaattagaaaaaatcatctaaaaaatgaaataaaaaagaaagttattacttttgttttattttcttgcatagaatctcctatttttattctattacaaaagcaaaaaattttactacaataaaataatattttcttttttggcttcttcaagaatttttttaggtcagtaactagattgaacttctccaatatgtgctttttctaataaaaacatacagagtctgctttgacctattccgccaccgatagaaaatggtaagttttcgtttactaaatcatggtgaaattgtgatttttgttctaattgcggcttagttaatttactttgctctaataaagctttagcatcaactcttatacccattgaagaaatttcgattgccttatctaaggtttcgtgataaaaaattaaatcaccgtttaaatttcaatcatcatagtcaatggctcttcctgagtgtacttgtccagacttaagttttcaaccaactctgataacaaaaaatgcttttgctttttcttgtgcaaattttgtttctctttgtgatggagtaagttcaggatataaatcttctagttcttgagaatcaataaaaatcaattcttttggtaatttaattttaagttgtggaaatttttttactagttctgcttcagtatttcttatttgatcataaattgttctaatagtttgttttaaataatcaagatttctatcttctttttttataattttttctcaatctcattgatctacataataagaatgaaatggggaaagaatttcttcttttctaattgcgttcatatcagtatataaacctttataaaggtaaaaatcatattctctcaaagcatatctttttcatttcgctagtgagtgaacaatttctaattttgtgtcttgatcttttggaataaaagaaacagcagcttcgccatttaatgtatcatttaacccagttagcggttcgacaaataaaggtgcggtaactcttgtaagtgataaagcttctgataaaaattttggaaaaataatttttatagactcaattgctttttgtgtttcaaaaatgtttaatttagatgtgtacattttgcctttctatattagatatctaaatagaaactttttattaatagcaaaaaattatcttgataaaagaaagattaatcaaaacttataattttaataactattaatataaaagttttgattaaatattatttatattaaaaaaattattattaaaatttaaaccatttaaaaaatgattattcaaattagcgtttaaatttaataataatttttgcataattgctataattatactcttttgttaaaaaaataataataaaaaatacactaactttttagtgtatttttgaaaaagtggtcaaaaatgaaatggtgggaacgaatgggatcgaaccatcgacctcacgattatcagtcgtgtgctctaaccatctgagctacgctcccaataacaggcaacaaagttgccaatataattatactataaaaactaacgttttgaaaattgtcttgaacgacgtgcagctctgagtccgaatttttttctttcttttgcacgcgcatcacgagttaacatacctttagattttaattctggacggtaatctgctgaagcttctaataatgctcttgcaattcctaacctaattgctccagcttgtcctgaaagtccaccacctgaagcgttaacactaatatttcattgatctgttgttttagtgatttctaatggttgtaatgcatcttgaattaataaatctaattttaagtaatcttttgctgctcttttattaattttaaattcacctgttcctggagtaattatgactcttgctacagaagattttcttcttcctaatccacgataagtaatttttttatctgccataactatttacctacctttaaaatttctggtttttgtgcttcatgtttatgttctggacctgcataaacaaataaattttttctttgtttatcacctaattttgtatgaggtaacattcctcaaacagctttttcaattaaagcaattggtcttttagctcttaaatttttagcattaatagtttttaatccgccaggatatcctgagtgtgagtaataaattttttgttcttcttttttagctgttaaaacaactctatcagcatttataataataatgttgtcacccatatctacatttggtgtaaatgtaggactagttttacctcttaagtgagaagctgctaatgtagctactctaccaagaacttgtccagcagcgtcaataacatatcactttttagtaacttctttatgttttactaatgtggtttgtctcatcacaattccttttatattttttaattaattttaaataatgtaacaggtttaagcaagtttttaaattatacatttttatttaaataacacaagaaaaatttttattttttattaaccaataattttttaaaattttcaattaagaattatattttattataataatttttaattatcatgagctcaacaaattatttaattaatgtcaaaaatttaaaatttcaatatgataaaaaacaggtttctttagatattgaaaaattgacatttccaaaaaataaaataataactttacttggaccaagtggtagtggaaagactactttcttaaacttactaattggttttttaaaacctacaaaaggagaaatacaaattaatcaagatccagaattttctaattttggattcattatgcaagataacaacctttatgaagaaataagtgtttttaaaaatgtttatttaagtgctaaaaactctagcaaatgaaaatctgaagttagaaattctttatgaattgaaattaaaaataagtttttagcttcaaaaacgaaggattctgatgttgttaaattagacaatttatttgctaaatatttaaaaaaaagtatacatgtagcaaagcatcaagttttttttgttaaattgatgtatactaaaattttattttatttacttaaattaagttttaaaaatataaaaattcttttatttttattagaaaataattatttaattcaattttttttcaaatcctttatgcctatagcaaaaaaacttcaaattgaagaaattatcaacaaaaaagcaaataatataagtggcggacaaaagcaaagagtagcatttgctaaagctattattaagaacacaaaattaatttttatggatgaaccttttgctgctttagatgcaaaaatcaaggaatctacaattaattggttagaaaaaatcaaaaaagaatttgatttatcaattgttttagtaacacatgatcaaactgatgctttaaaaataagtgattacatcactgtgttaaatcaaggaaaagtgatgcaatttggtgaatcagaacaactttataacaatccagctaacttgtttgtagctaaatttttaggctttcctgaaatcaatttttttaaaaaccaaaatggtatagatttctatgtacgagctaataaaatcattgtatctagcaacaaacaagaaggatttttaccttttaaaattgattcaaaaaaattaattggtgaatctttattgtacaaagcaacaagcttaaacaatgagaatcctattagtttaaactttttgcaaacaaataattttgaaacccaatcaattatttatctaaaaataaatgaagaagatcttttaaaatttgacaaagaaggacaaagggttttataaaatgaagaaaaataataaaattttaaacaaaatgtcttcattttctgaagcaacttgaaaaaaactatctcttagtctgagaaaaaattgaaaaggttttactttgataactcctttattaatttttttaattgttttttcaatttatcctttgttaaattcatttttttactcattgagaaactttgaacaatatagcaggataaaatgacacttcggaattagtaattatcattttcttgtttctgattatagattcattgatagtgtgaaaaattctactattttgttttttgtggcatcccctattgcaattatcgttggttttcttttagctttggttatatcttctttgaccctaaaaatttcaaaaaatatattcatcactgctctttattcacagttttttatttctgcatttgctgtaagtgtagcttttgttttgttatttggtgatagaaatgtactaagtgtattgttacaagaaaaatttcattttggaaaatacgattttgttagtggaaaccaaaaaacacctttaattattttattatgtatatttcaactttgaagagcaattccgtttaatactgttttatttagttttgcaatcaataaaattaatcttaaatatagtaaaaatctaaaaatagattctttatctttattcgataaagttaaaaatttgtattttcctgaaatgaaaataacaatttttaacattgtttatacaaactttatttttgctgcgttgctgtatcctcaagttttaataggaaataaaaatttaaaagattttcatggagacacactagcttcttacattatttctagaataacacaagatgctaatgcacctgttgcaatggcagcatcattttttaccttcatttacctttgctttttgctgttatttatttatttactgcgttgaaaatttataaagttatacataaaagctgcaatatttttaatcacaaaaataaaaaaatcaattaaaggagtaaaaaatgaactcactaagtagcaaacatttttatctcatttataaactaatttttgaagttttaaaatatgctttgattagctttgtaattattttgattttgtttccaatttattttttaattgttcaagcatctttgaataatagtgaagctctttcaaataatgtttttttagctcctaaagatagtttatgaactaacataaaagaagtaatggatcaattatttttaaatggatttaaaaattcaatgttaagtgttcttttaattaattttttaagaattagtttatactcacttgcatcttttggtctagtaaaagtaagtaaatttagtaaaaaagtcttctatttgctttttatttttgtatctttaactcctgaaatttctttatatatgggatataaaattttattatacaaaagcaatattttagaatctaatgttatttttcctttaataataaaccaaattttttcgtttttcttattaatgtatttatataaaattttaagttcagttccacagaataaaattaagttaatgacaattgataacttaaatatgtttcaaagatttgtttatgtgtatttaaaatatttgaaaatgccttattttttaataattattttttcttcaatccaagcttgaaatgatttcttatgaccaacatatattttaacttcaagtagtgaacaaactatttctatttgatttcaatttagtggaagtagagatgcttcagcaaatttttataatttaaaagcagcagcttcatttatagcgttaattattcccttgtgtacttatttgattttttctccatttgttaataaacaaatttctaagagtttttaataaaatcataaatttggatatattgattaagactgatttgttgcggtcttatgttataatttaaattgaatttaacatataactctttaattttttcttgatttaagaaagtagaaagattattataaaatgtttttcttttcatagaaaaacatttttttgtaaaatctaaaaaaccttttatgtattctggatttaaattttttttgaatttaaaagaaactaaagccgaattaactttaggttgcggactaaaactagaaggtagaatttttaactcttttttaacatcagctactaattgacaagcaagtgataactttgaaaaagcacttgttttttctttagctactattcgatcagctacttcttcttgtaccataattagcatagatttaaatttattaacattctcaaaaaccttgaataaaatttgacttgttatgtaatatggcaaatttgcaacaagaatttttggagttgtaaaatctaaatcagcttctaaaaagtcttcatttttaagcataaatttagaactttttattttattttctaaacaaacaatcaaatctttatcaatttcataagctaataaagattttgcagattctaaaagagggattgtaatagctcctgtacctggtccgatttctaaagcatcctcatcttgagaattggcaagctctataattttattgattacaaaatcatcttttaaaaaattttgtccaaatttttttttagcttgaatggtcttcatatagttttatattaaaaattccttctatattttttttgacttgttgagttaaagagtgtaaactaatttctttgattcttgaaagtaaataaaaactttgtttaatgcaaaaactgtgatttggtcacaaagatctttttggctcaggagataaatatggagcatctgtttctagcacaattttttctaaatcaatatgttttaaaatctttcttgcttcttggtttttcttatatgtaataactcctgaaaaagaaaaaaatacattctttaattgtgcaaaatattgataaatttcaaagtttgcagaaaaattatgaaaaacaaatttaacatccaaaaaatcactaacgacttgttttattgtgttgaaaaggaaaaaatttttatcatttgcattgtctcttatgtgcaacattacagttttattatatttttgtgcgattttaacttgttttataaaacactttagctgtaattcgaaactaggtgattgatcataatataaatccaaacctacttcaccaatacctgctacttttgaattttttgcaacaatttcttctaataattgaaaattatcttcatttgtaatattattaggatgaatcccaacaagtgcaaaaagatttggtacatagtctaaatatgaaataatttcttgattatcttctcaagaagtaccaactaaaagcattgcttttatattgtttttgtagttaaattctaattcttgttttggttctttataatattctttaaaaggatgagtgtgaacatctgaaaaaaaataattttcttctaagtaaaaatgtagcaaaattgcttcattttgtttgctaatttctttaaaaatgaagctttttttcactaaattgtatattttttcttctagttgaatttctatgaatttgttttttaaattaagtgtattaataaaaaaatcttgaatgaattcaaaagttaaaatacttcatttttcttcatttaataaagaatttattcttaaatcaattgtaaaaaagttggtttttatgctatcttgaattatatttagataaagacctatttctaaaaaatcatcatcttcatctactaataaaaattctcaaaaattttcttgattttctaaagtaaaaatcttaaaactatctttagttgattttgaaactaaaggaaataaatttgcttcatttttatagcttaaatgatatttattttgatattttggtgtgggttttacaaactgtcaattcatattatttcttgttggcttttagtataaaaatttgtttatcaagatctgattttacttcttcaattgaataattataattttttagaacttttttgtgttctaaaacttcatcccaaatttttggacctttaattcataaagaagtagttgtaggattttgcaattttttagtgattttaaataaaaaatctagatttcccaccgctcttgctgtaatgtagtcaaatttagcttgcaaattagaagctaaatcattaattatttcaaaatctaaatttaattcttgctttactaattgcaaaaaatcacatcgcttttttaatttttcaacaatgactaattttatatcagaattgataataaagaaaggaattgaaggaaaaccagcacctgcccctacatctagtaaagcaatttttttgttttttaaatatatactttgttttaaagtaataatagattcataaattccttcttttcataattgatcttgagtaaagccagtgagattcataaccttatttttttgttcaattaaactaacaaatttttctaattgtgaaaaaatttgttcattattaactaaatctctagttttttctttaaaaaaatacattattttttaaagttttctttcaattgtgagtatatagatgaaattgatgttgaaaatatacaagcttttatggtatccgcaataaattcggataaacaagcaacttctaacttggaatattttgcttcaagttctgaattatcaattgaatttgtaattataactttatctacatttttactttcttgaaatagctcaaaacctttggaaaaaatcccatgtgtagcaactactgttactgattttgcgccattttttttgagcatatcagcggctttaataattgttccacctgtgtcgataatgtcatcaataattattgtatcttttgcttcaatatcaccaataattccttgagcttcgacttgatttgttcctattcttcttttatcaataatggcaatttttgtattttcatttaataattcagctagtaatcttgcacgaacagctccaccgtgatctggagaaactattgtataattcttatttttttctttaattttcttcgcaagaatatattgacctcttagttcatctactgaaatattaaaaaatccttgaattgatggattgtgtaaatctacagaaataatttttgtagctccagcagtttctaataaatttgcaattagttttgctgtaattggttgtcttccagttgattttctatcttgtctagcatagccaaaataggaaaggattacaataatatctctagcatatgctctttttaatgaatccataaaaattaataattccataatattatcatgaacaggtttgtgtgtacttgcaactacaaaaactgtggaatttctaatagtttcaactgattttaaaagtacttctccatcagcaaactgagttttttcaattggtgttaaaggtatttttaaaatttcagagattttatttgctaaattttggcaatttggcattccaaataaaacaacattttttttattttcaacaatcatattttcctttttttataatactaataataaatctaaaaattatatttttagttattatattactttttctgcttcttattttgagaaatttaaaaataaaaaaatccacttgttaatttggatttttttatttttaatttattcgaacgaaacaacaaaaaagttctttttaccttttttaattaataatttgctaaagttttgttttaattttgagttaatttcttcttgagacttaataatttgaccatttacttgcaatgcagagtctttaataaattcatttagttctcttttagatgaaaaaatttttaattcaactaatttgttagcgttgaattcagattcttgaagtacaaaattatctacagattttgctaaaagatctaaatctgcttgatttaaaagctcaaagcttaagtttttaaataacaaactagaaatttttaaacattgttcaagtgttttttgtccatgaagatttaaaataatttcttgtgtcatttgatgttgtagaaacttctcttttttattttggttatgtttttgaaggattttttcaatttcactaaatgttttaaatgaagttcatttaaaaaatttttctgcttgaaaatctgataaatttattaaaaattgatagagtttaaaaggagaagtaagattagaatctaatcacaaagcatcaccatcaaatgttgtttttccaaatttatttccattttcatctgttaaaagttgggttgtaagtccaaaacaaggcgaagaatttttatcttccaaacttgtttttttaatcatatcaagcccttgaacaatgtttcctcattgatctgatccaccaagttgtccaactatattgaatttatcaaataaatatttaaagtctcaagcttgaattaattgataactaaattctgtaaaagaaagtcctgttttaatccgtgaagcaatagaatctttggttaatagcaaagcaacattaacattttttccaacatcacgaagaaaatctaaaacattcatatctttgtaaatatcaaaattgtcaaaaacttgcaaatcaaatttttccaattgtgctttgatatagtttttatttttaataatagcttcatttgagagtaaaactctttctttagaaacaaaggaaggatcaccaatcattcctgttgctccacctaaaactgctattgttttaactcctgctctttgaaaacgttgtgctagatttattaaaatataattacccaaatggagtgatttagctgttggatcaaaacctacataaattccttcattttgccgcatatttaacaattttttttcatcactaatatcttttaaaattcctcttagtttaatttcctttaacaattcttcttttttcttcatttttacctttattttttaaatttttctggcactgagtctaagttaatgtgacaatatccatttggatttttatctaaatatttttgatgatattcttctgcaatagttaagtttttaacaggtaaaaactctattgtagtttgaagttttgcttcattttcaaaggatttattaagttgtctaaaaatatctaagagttgttgatcatttgagtaaaaaccaatacggtattgtactcctacatcgtttccttgtttattaactgaaaagggatcaactattttcaaatacaaagttcaaatttgttcttctgtcaaaagcgaagaatcataaacgagttcaactgcttcaacatggcctgaacctgcacaaacttgcttgtatgtagtttgttctgtatctccatttaagtagcaaacttgagtttgaacaacaccttttactctttgaaaaaaggcttctactcctcaaaaacatccagctgctaaatatattttttttatcatttctttccttattttaaattgaaaactttagcttgatttttgattttttaaacaatttttacttaaaaaaccagttgtatttggtaattatataacaataatttgatataattttaaaatattaaattaaagggttttaaaggattattatgtatttcaaaaatgatgatgacgaagtaaaaaacaacattcaaaatgaacaaccagagtcaaaagaaaatgattatgaaacttatgaagatgaattaaaaactgtttttaatgaagaaaatgaagaagaaattgatgaagatgaagcagaactagaacaaaatcaagaaggtttccaagtaagttcccaattaattgagtcagaagctgacaacattgttcctaaatatatctctgaagaagttagaacttcgtttttagagtatgcaatgtctgttattatttcgcgtgctcttccagatgttagagatggtttaaaacctgttcacagaagaattttgcactgtatgaatgaactaggaattacacattctgtagcttataaaaaatcagcaagaattgttggtgatgttcttggaaaataccacccacacggagatgcatctgtttatgattcaatggttagaatgtcacaagattttgcccttagatatccattaattgatggtcatggaaactttggatctattgatggtgatgaagctgctgctatgcgttatactgaagctagaatgtctaaaatagcttcattaatggtagaagacatcaagaaaaatacagtagattttgtaccaaactatgacggtagtgaacaagaaccacaagttttacctgctagatttccaaatcttttagtttctggagtctcaggaattgctgtgggtatggctactaaaattccccctcataatttaaaagaagttattgaaacttttattttattagctcaaaatccagatatttctgttcaagaactagcaaaacatttaccagcacctgattttcctacaggagctactattttaggaacatcaggaattagacaagcttatgaaacaggacgtggagcatttgttcttcgttctaaagcaaaaatcgaaacttttagcagtggtaaaagcaaaataattgtttatgaaattccatatgaggttaaaaaaccacaaataattgaaaaagttgttcaactagttagagataaaaaaatccaaggtcttaaagatgttcgtgatgaaactaatagaaaaggaattagagtagtttttgatgttaaaaaaggatttagtcctgaaattattttaaaccaactctacaaagaaactgatttacaaatcacttacaacatcaatatgttggcccttgtcaacggtataccaaaagtgttgaatttaaaagacattttataccaatacttattacatcaagaagaagttgtaactagaggattacaatttgatcttaaaaaagcaaaagaaagacataacattttattaggtataaaaattgcggtcgaaaacatagacgaagtaattaaaatcattagagcttctaaatcagatgctgaagcccaaacaacattgggtcaaagatttgatttaaacgaagcccaaactaaagcaattgtagatatgcgtttaggaagattaacttctttagctattgaaaaacttattgcagaaatcaaggaattagaagaagaaattgaaagaattacttcaattattaactcacacgacaaactaattgaactcattgttaataaccacaaaaaaattattgaaagctatgcagatgacagaagaacagagattgttcatggaagcataggtcaaattgttgatgaagatctaattaaagagcaaaaagttgttcttacattaactaaaaataattacattaaaagaattaatttagatgagtacagaatgcaaaatcgtggtggtactggatcttcaacagcaacaacttacaaagatgataatttaaaaaatatattagttgcaagtacacatagtgatttactaattcttacttcaaaagcaaagatttttagactaagaacacatcaaattcctgatttatccaaacaagcaaaaggtgttccttttattaatttaattccaatcgaaaaagacgaagatattgtttctctactggtaactcaagaaaattatgaagatgataatttatatttagtaacagtttcaaaacttggaatcatcaaaaaaacaagtctttctctatacaaacggatttcaaaaaatggactaattgccttgaatttgaaggaaaatgatgaacttttaactgcatttattaccactgaggaatccgaaatcatcatcggagcttctaatggtagatcagttagatttgataaccaagactttagatcattatctagaaaatctatgggagttaaaggaataactttaggtgaaaatgaagtagttgttggtgcttcatcaactgatcaaggatcaacggtttttgttcttggtcaagaaggatatggtaaaaaaactcatattgatgaatatagaaaaactgctcgtggtggaaaaggagtaattactcttaaaactgaaaaagcaggtaatttagcttttatttcctgtgtaaaaggtgatgaagaaattttaattttaactaaacaaggaatagtaattagaacttcattagaacaatgtaatgatgtttctagaaatacgaaaggtgttaagttaattactttaaaaccaaaagattctattcaatctgttgcagttctagaaaaaatttatgaactttaagaacaaaaagtttatttaaaaaaacttactttttaaaagtaagtttttttaatttgtttattttaaaaaataatataattctatttactaaaaaggagtaaaattatgaaaactattgtcgaaaaagtttatgaaaatcttaaaaacaacgaaataaatcatagtatgaaaattcttgaagattatatttcaacttcaaaagcaagaaataaaaacagcattacaaaagcttttaactacaaaaatgatgacgaatgatacacaactagagaagatgtgcagttttttattgataacgcaaatatacccaaagataaagtgatttggtgtccttttgatgttgaagattctaattttgtaactgtttttaaaaaaaatggttataaagttttgcattctcatatttgagatcaacaagatttttatgaatatgaaccaaaagaaaaatgagacattataataagtaatcctccttttaaaggaaaacatagacttttagctagacttttagaatttaataaaccttgagctttaatttttggaattcaagctttaaatagtgaaaaattttgtcatgaattgcaaaaatttaaaagagttcaatatgtacatttaaaaagaagaatgtgctttacaaaagatcacttaaattatgatattaaaaatttacaaagaccttcttttgcaagtatgtgaattgctaatgatctttttgataaagatattttagtgtgaaatggagttgattataaaaaagatggaaaagaatttttctaaaataacaattcaagttccaaaagaatttattgcaaaaaatgatattttaaagtccattgttgaactcataaattatgattttaagcaacttgcaaatattaaatttgaagatgtaatttgagaacaaattaacgaacgatttcaaggattttttataaaagaattaagttattttgtttatattacacaaaaattagattccaaaacattgaaaacaagaagtagaaatacatttataaaacaaaatgcattaccttttattagaaactatgaaaaacatttcaaaaattttcataatgttaaattatttatgagtctaaatcctgtttcattttctttaataaaaaacaaaaatgataagtttacgatagcagaatccatttatattgatttaaaaatattaatatcactgtatggctttgctataactaaatctataattaattttgctaatattaatgaaaaatatgaagaaaaatgaagtaatttaaacttagaaacttttattgctctaaaaagagagaaaagtaacgtaaaaaaacgaaataaacctattatttttgaacttagtcaaaatagagaagaaattactgtttatgctaaattagaaggcgcaaatgtagcagattcttattttaattgtaaatttatacaagaattaaattcaaaagaacaaaaaaattttaagctattcttattcattataaaacctaaagttcaagatgttcatatattaaaagattttcaagatattggttttaatattattaattattattcagatgaaaatgattatgataaagcaacatatcaattaaacttgagaccaaaaagtaatagaaatcaaggattatttagagcaaatataattaaaaagtataataaatatgttgatatttatgaatgttttgcttgtgagtatagattaaatttagttgctgctcatattcacagagttgcagatattaataaattaaaaacacactcaaaatttataacctctgctgaaaatggttttcaattttgtccaaatcatgataaggaatttgaaaacggaatgatttattttgatttagatgactttcaattcaaggtaaattccattaaaattgataatcctaatgactataatcttttgaataaaagaataaaaaataagctgtcaaagtttaaaaaagaattatattctaataactttaaatttatgattgaatttcatttaagaagaattggtttaattgattaaaagtttgaaaaattcttcttctgaaaggattttaacaccaaggttacgtgctttatcttctttagagccaccattttcgcctaaaattaaatacgaagtatttttggacactgatgacgaaacttttcctttattttgaaggataattgattcaatttggcttcttgatctagataaagttcctgtaattacaaatgataaattttctaaaatgttagagtaagtttcttcttttattatttcaaaatttacttggattaattcattaataatttgtaaatttgcttcatttttgaagtaatttttcaaactttcaactgttttttcgcctatatctttatcttctaaaaaagtatcaaaattaaaggtttttaactgttctaaattatctactttctgagctaacatttttgctgttttttgtccgatgtgtttgattcctaaagcaaaaattaatttatctaaagtagtatgtttagctttttctattgcatttattagctttaaaatagatttttgttggaaagattttagtttagaaatttcttcaattttggtagctagcctaaaaatatcaggtatagatctaattaaattttgatctcaaaaaagttcaatttttttctctcctaaatctttaatatctaaaccttcttttgaacaaaaatgaataatttttcttaactgaataccgagacaattgggattaatacaaaactgatcaattcctgtttcgctatctattaaatcggaattacattcagggcaatttgttattttttcaaaattagttttttcaaatttttctactgattgaataacctgagggataatttctccagcttttttgatataaaccattgagttagtatttatagctaaatctttaatgtaattataattatgtaaagttgctgcagaaatagtagaaccttgaagtaaaacaggttctaaaacagcattgtaagttatttttcctgttcttccaactgttgcaaaaatatgttttaatttagtttgaacaactttgtctgaaaatttaaaagcaatagcactgtgagggaattttgaagtagttcctaattcatcataaagtttaaattcatttactttaataactacaccatcaatttcataatttaatttgttttctttttcttgaatttcttcaattaattgatagctttggtgaatatttgctttatgttgtcctaaattatttgtattaaaaccaagggtttgtaaaaactgtatactttcttcaacagttgctaaattatgcaattctgggtttactacttgataaacaaaaacttttagatttgctagtttgttacttttagaatctaatcttctaagttgacctgcagctgcatttcttggatttaaaaacaatggtttctcaagccttgcttgttctaaattcatatttttaaagctttctaaatcaagaaaaacttcaccacgaatttctatatcatcaaaataattaatagattttggaacatattttgcatcaatgttttcaatattatgacttacatcttcacctgtagttccatcgcctctagtaactgcttgggtaaatttaccttgtttatagtgaagcgaaattgaaatgccatcaattttaggttctacataaaatgaagcattttcatctatttttatagctttttgagcaaacttttctagttcttctaaactatatgctttatttaaagacaacataggttgtgaatgtttgattttttgaaatctttcatctactttagctcctacaatctgtgtgggagaagcattgttttcttctaaagtaaataagtaaaaatattttttttctaatttttttaatttatttagttcttgatcatagactaaatcatcaacaataggaatatctaaatcaaaataatgatgatttcataaatgaagtttttgacgaagttcttcaatttgtttttttgcttgtttttcttcatttttatagtctttttggtcgatattcataaataattcctaaaaataattttaaactttttgatttgtgtattttcatcaaagaggtaaatcattcattatatgacctacatttttttcagttattattacaattgtaattaatgtaattaatgctaataagaaaagatagtcaaatcattgaaatcttattttacgatattttgttcttttagcatatggatcataacctcttacttccatagcattggataaatcttctgctcttgaaaaagaaagaacaaataaaggaattattaaagtaatcattgattttgctttatcttttttcttaccatttttgaaatctacaccacgtgaggattgtgctttcataattctacttgcttctaataacaaagtaggaataaatctaatagctattgaaacaatcatagcaattatatgagttggaataaataataatctaagtggtcaaattaaatcttcaattccttttgttagtaaaaatggttttgttgaataagttaaaattgttgttgaaattatcaaagcatagattctaagcgaaattattcctgatctaatcaaagataaagttccaatttgaaactcaattgaagtatttggaatttttgttactttcattcaatgaacatagttgtaaatttcttctgtatttaaacctaaaagcgaaaagcctattttttgtgcattgggcgaatcaataatatcgtttgcattttgttctgtaattaaaaatccataaataattaacataaacaaaaacaaaagaataggtaattttaaaagtttaataatatctattcatcttttggttgtgatatagaaaaatacaagtgtaaaagaaagtaaaaacaataatgtaatgatatgtgaaattacaaaaaataaaatagcaaaaacaatattaaaaacaatttttaacctaggatctaaacgatgaattatagtatcacgtggtacatattttccgacattaatttgcatgttttccttttaattttaaattaattgcttctgctaactcttcaagtgaagaaacatcttgaatatctaaaccacgttttcttaacttttcaacaaaatataataagttagttggcatcatctgattatcttttaaaaattggttatcagataagattgaaaaagtatctccgtctttgacaatttctccatttttgaacacaatcgttctttttgttcattttaaaacattatctaaatcatgagttgctaaaatgattgtttttccactttcataaagattgttcaaaatcaaaagcatatcatctgtacccgcgggatcaaggccagctgttggttcatcaaagaaaattatatctggctccatggctaaaattcctgcaatcgcaactcttcttttttggcctccagataagttaaatggtgattttggaagataagattcatctaaaccgactagtttaataatttcttttgctctttcttttgcttcggcttttggtgtacccatagacacagcaccaaaaattatatctttttctatagtttgttcaaaaagttggtattcagcaaattgaaatacaacaccaactcttcttcttatttctttgataaatttaagttttttttgaaagctcttcggtttttgaattatgttttttataacttctacttcttgtgtttttggatctttagctttgtagacaaattctacttcaccttcatcaggagttaataaaacattcatatgttcaataaatgttgtttttcctgaacctgtttgacctatgatggcaatgaattcattttctttaatttcaacacttacattgtttagtgcttttagttctgtaggtaattttttgttgaaaattttaacaatattttttgctcttatttgcatagtatatccaataattcatcttcatcataagtggggctaattccttggattaaagaagaaagtttataaataaaaggagaatcaatttttgctttttctatgatttctttgttatttaaaatatgttttggttcaccttgagcgattaatctaccttgtgaaaacactaacaactcatctgctaaaactgcttcattcatattatgagttattgaaataagtgttttatctccttgttttcgcagctcgttaataattttaacaacatcgtattttccttttggatcaagcatagatgttatttcgtcaaaaataattatatctggatttaaagccaaaattgaagcaattgctactctttgtttttgaccaccagagagaaattgaggctcattatccaagtattttagcatattgacttttgttgctaattcagtaattatatccttcattttctttggatctacacatttattttccaagctaaaagctatgtcttcttctacagttgctccaacaaattgattatctgggttttggaaaataattccgattttctttcttatttcaggcaaagttttcgaagacatttcaatattgtctataaaaacctttcctttttgtggtttataaattcctgaaataatttttgaaagtgtagattttcctgatccgttatgccctaaaacagcgtaatactttccttttttaatatttagcgaaatatcttgtaaagctcaagtatgttgtttttcggaataactaaaagagaccttttctaacttgatcatgagtgtcctttttttactaatcttttataaattctttctttagaattccaatataaggaagatttctaaatttttcttgataatctagtccataacctattaagaataaatcaggtacttcaattcctattttatctggtgtaaattctacttttctttttgcagatttgttcaataatgaagcaactctgatgcttgttggttgttttgtttttaaatattcaataactttgactatagtaattccagaatctacaatatcttctataattaaaacgtctttgcctttgatgtcatgagctaaatcggtaacaattttaattgtacctgtggatttgctagctccataataagaagatgctactatgaaatctattgtatgatccacttttacacttttaattagttgtgctaaaaagagtattgaaccctttaataaacctactaataccaaatcttttgagtctttataagtttcatttattcactgggctacttctttaatcttgttttctataaattcttgagtatataaaattttttcaactctataatcttgttccatatatccctttttttaattttattttttaataaaaatgtattttttgcttagttaaattttcttattatatcacctttttctcaaaaatttttgagtatttttcgtacttattttttttaacttttaatttaatttctgattcaagacgtaacacaagagtaaattctcctttaacattttcacccaaagcttgtttaatatctgtagctgaacctaaaaaatacctctcatgaatcttggtcatttctttaattaagaacaattttgcttcatttttgaagactttttcaatatcttccagggttgcaattaatttatatggtgaaacaaaaaaaacataggaaatatctggtaaaaattgttctaattgtttaactctttgcgaagacgtttcttttaaaaatcctataaaaatgaagggtaaattaaagccagataaagcgaaagcagaagttactgcgctaggtcctggaataacttcaagattaataaaattattatgacaatactctactaaaatttgtccaggatcagaaattaaaggagttcctgcatctgaaattaaagcaatttttttgtcttgttcaagtaataaagatattttagataaagatttgtactcattgaatttatgataggaaattaaatgtttattacttatttggtagtgatttaataactttgaactaacacgtgtatcttcacacaaaatcgcatctgcatctttgaggatttctaaagctcttaaagtaatgtctttgaggtttcctataggagttgaaactatagaaatttttttcattttattttagactttcgtaaaaatttactaaaaaattatttttttgtaaagtaaagttttgagctgtttctaatgattgaataaagttttcaattaaagaaataatttcaaaatgcttcggagcaaatttgtccttctgttgcttcaatctgttttctcaatttctaaaaatatcctttcaaaatgaaggaaaaatagaaaaatctttagcaaatatgctaaagaaaaagagttttaaaattgagagtaaaaacaaagcattttcttttgttaacttcttataaaaaaagttaatcagttccaaattgcttttataatgtttgtttaaagtttgttgaatttcttttaataattttaaattttcatcattaatatttcttttaacttgttctaaaccagaatagatgttaacaaataaagtgttgtattcaaaagctttattttctttgtttaaaatttcaagaatttcttttttattatcttcgtaaaaattaaaaacttgacatctagacctaatagttggcaatactttatcaatatgtgtagtagttaaaattattaatgtgtttttaggtggttcttcaagagtttttaaaattgcatttaaaatggaagtatttgctaaatcaatgttttttattagtaaaactttttcatcttgttgcgtaaatgaagaaaaataaaggtcattaaaagcgcttagtatctctgatttgtgtaaagtttttttaacatcaaacatttgaaaatttaaattatttttattaggattaactcctactttatgaagcaaaatttctacatttttgtctatattgtcttcatttaaactagcaattaaaaaagcatgaaataattgttcttgggtagcgattatttttgaaaagtgtttcattttttaactaatttttctcttttttcttcaaaagcttttttaatttgttcaaaaactttatcttcattttgaagtgcatcaatacgaattattctttctggatatttttttgataaatattcatatccactacaaacttttgaaaaaaacttgtttcctttatcctctattcgatcattatcagaagtttttctttcaaaagcttgctgaattggaacatctagccaaaaagtcaaatcaggttgggttttattagaaatccaatcatttaattgttcaacttgattaatatcaatttcatttccaaaagcttgataagcaatagaagaatcaataaatctatcagaaataacaatttttccttcttgtagtgaaggtcaaataagtttttctaaatgtaaacgacgagaagctgcaaataaaattacctctgtaaatttgctaatttcatattttttatccaataataaattcctaataatttcggcttcacgaacttgaaaaccaccaggctctctagttaaaattatctctttttttggaaattcattttgtaagtaatgatacagttttttaattaacgttgattttcctgaaccatcaattccttcaaaagttataaacattttgactcacttttctttattttctgttctttattgcttcttttagtgttaattcatcaacatactcaatttgagctccaagaggtataccacttgctaatttgctaattttaacgttttttaaatctttatgattcataacaaaattagctaaaactaaaccttcaatgttaaatgaaaaagctacaattaattctgtattttctctaattaaatttcttaatttatttattttggcagttaaatatttattgtcaacaccttttttataatcaaaaacaaagtattttccttcataaaatcttagattttcaaatttaattacatcgcttgaattttcaaccaacataatttgtgaacttcgatctggatctaaacaaattgaacaaacaacatttaaagatacaaaattacaacgctcacaaggttggagattttgttttaatttaataattttttgactaagatcttgaaaaaattcaatatctttgttcaataaaaaataaaaaaatttttcagcttgttttttgccaacaccaggaaatgttttaaaagtagaaattagctcttcatattccttaccaaacattaaaagggtgttccttcttgtttaggcataagtgcttcgtgttttttattaagttctaataatgcttcattaattgtaataattaagagttcttctagagtttccatatcatctggatcagctagtgctggatttatagttagttttttaatttctctaccacctgagataactaattcaattccgtgtcttgaaaatgtgaattcttcttgatttagtcttttttctttttctttaatttctttttgcattttttgtgcttgtttcattaattcttgtatattcataatagtctccttatatttattaatttatatgatttttctttttttgttaggaaaaatttcagataatctgttttcatcacttaaagaatcagcattgattttcgccaaaggaacaatttgcaccgattttaaagtagctgaatttgcttttcaattgctaatagttttttgacttaacttgttagaagcaacaaataagtgcattggggtttgaaacatatattctaacaattttcttgaaagtaaagaattgttttttacttctttgattaacaaattttctaattcattattttcttctgtattagaaatcaaaataaattctgatgaactcacaacaattttagttgtttttaacaaatgagcaaaagaagaaaattctgtactagctgttgctaaatccaatttatcatttcattgttgttttaatttagcattaatactttttgctggttcaccttcttttatataaatacgaaataaattataaatttcttcttctgttaaataatcttctgcttcttgtacagaaacaggtggttggaaatcatttggattaaaaaattcttgattttcaaggatactagctgtattctctaaaggttgttctgtttctgaattagtttgatctgcttcattgtagtcaaaaagcgacataccttgtggattgtttacagcaatagttttttcgactgttgcagtatctaaattattttttatttgttcaactaattcttcttcatttaacaaacctaaatcttcaaaatgttcttcttgagtgtttatatttttgattttttgtgaaggagttgaactggtttgaaaatcttcttttcaactgtttgttgctagtgggttagtattttctattgttagtttttctacaactggcttagtagggggtttttgaggatttgatcaagaataattatttttagtttttgttgctaattctgtggctgttgaaatatctttgatcgaatttataacactttcgttattcgcttttaaatctttagcttcataaagacgttttatgtgcaaatctctagcatcaaaaccagatattgatgagtttgcgtcatttgatttttcagctactgcaaataattttataattgcaatttgaatactcattgctggattattagaacttattaattctttttgtgttttgactaaaacatcttgaagtttatatgctgttaaaagagaaagaggaattttttctatttgttcaactgaaaatccttctaataaagtaatatcttttgttttttgataaataataaaatttttaactaaactaattaaagaactaattaaaatatttggattagcaccttgttctaagatagtggaaattaggtggaaaatttgttgaagattttcattatgaatttcttttaataaattaataagtttttgagttgaagtaagaccaaaaagattttcaacatcaatcatatgaatttttgatcttgaaaaattatttagttgttcaaccattgctaatgcatcacgtaagcttccagatgagagctgagcaattgctcatagcgcttctttttcataggaaatttcttctttttcaagcacatattccagtcttgaaactatttctttttcactaatttttctaaaattaaaacgttgaactctagataaaattgtcaaaggaattttatgagcttctgttgttgctaaaataaaaatcacatgttttggtggctcttctaaggtttttaaaaaagcattaaacgcactagaagacaacatatgaacttcatctattatgtagattttatattgtgaatttgtaggcaaattgttaacattattaattaattctctaatttcatcaacaccgttattagaagctccatccatttcaataatgtcaaaagaattgttcacagaatcttgacatttttgacaaggaataaacaaatcggttttatgtgaacaatttagtgtagttgcaaatattttagcaactgaagtttttccagttcctctaggtcctgaaaataaataagcgtgaaaaatttggtttgtcgaaataatattttttagcgtttgaataataaaatcttgaccaacaacatctactaaagttgttggacgatatttacgataaaaagctaagtaattttttgacatactaattaaaaatctccactatttgcttgacatatttatcttctacttttaaaactgcaaaagctattgcttgtgggcctgtgtgaacagaaataacatccggaatattaaaagtatgaatagtttgttgtgaataagtttccatttctgttctaattttttctatattttcattgtaagaatgaagtaaaactatttgatgacctgagccaaatttatcaactgtttgtttaaaaaatttcaaaattgttttatgaaaaatgtttccttttccttctttatgaagctttcctccttcaaattttattaccggaacaatttttagtaacttagtaagaacagctgctgaagacgaaagacgacctgaatttactaagtaagaattatcatgtggaaaaagtaaaaattttccttcaacttcttggttcaatatttcaaatgctgtgtcaaaatcaacaccggatacaatttggtctctaaatcttaaaatatctaaaattataagaagagttaactttgttgaactcactactttaacattttcaaaatcctttgctaaattaacaaaattttgatactgtgaagaaagatactgactaattggataaagaataactttatcatattctttgcttaatttttcaattgtttcttgaacttgtcctagtaatgttgttgatgttttaaccttactttttttgctaattaattcaaaaatttctccttcttgcaaatcaattccgtcttgatattctttgtcattgatgtaaattgttaagggtaaaaaaaacacatctaatttatgtgctaattgtggatttagtccagtagaagaatctactactattgctattttcataatattggaaattataataaattttcacatttctactaagggaaaaaaatagaaaactaaaaaatcttttctatagtttaaataactaaaaaaatatataattttaattatgaacaccttgcaaactaaaaacagtaaagaattaaatttatcatttgactttattgtaaaaaaacacgaatacagaattctcgatattgaactaaacggagcactaagacaactagaatattcaaatagatattttgaatgatttattgaagatttactttattttttagatatgaatagatatcaaaaaagatgggattatgaagcaataaacatttttaatgtacaaagtttgaagctaaatgaagaaaatttgaagaactttttaaaatatttttcaagtgtaactaattttaatctaatagcaaaataaaaaaagaaggaattattatgataatttatgttacaaaaaaaacttctccattttataccctagcaatggaagaattgcttttaaaagacgaaagcatcaaagaagacattatgtatttttaccaacataataatgcaattatcattggtaaaaaccaaaatatctatgaagaagtaaaactagacgttgtggaaaaagaaaaaattgaagtttatcgtagactctcaggtggtggcgcagtttatcatgacctcggaaatataaacttttcttttataactaaaaaagaaaacaacaattatgaaaaatttctaacaccaattattgaattttttcaatctttaggtttagatgctagattcaaaggcagaaacgatttagttgttaatggagcaaaagtatccggaaatgctcaaattgtttacaaaaatagaatggtgcatcacggaaccattttgtttgatgctaacttatcaaaactttctgaagtcttaattccgaacaaattaaagatagaatctaaaggaattaaaagtataagacaacgtgtaaccaatattttatctgaattagattttaaaatgtatcacgacgagtttattgaaaaattaatttctttctttgaaaaaaaatatcaaagcaaaagacaagaactaccttctaagtatgacaaagaattaaaagaactaggtgaattcaaaaaatcaaaagaatgagtttatggaaaaaatccttctttttccttcaaaattcaagcaaaaacagatggtgggattttgaaaattcttgctaatattgaaaataataaaatttatgatattgcttttgaaggtgattttttatcacaaaaaccagtggaagaaatttatcatttgtttattgatcaagaattttccaaagcaaatataggtagaattttagactcagttgaactagaacattattttggagctattaaaaaagaagaaataattgctttgttttttggtgaactaggaggtgaataaaaatatgtttacaagaaaaactatggatattgatggtgaattaatttcttatattgaagaaaataatgacaaacctaaaattttatttttacatggttttgcttcttctagtgaagcagcacaacaagtttataatttaactaatcgaagctatggaatcatagcgcttgactttccgggttgtgggcattctagtgcaaaaaaagatataaatattgaatattatcaatttattgcaaaaagatttgtagaagaacttaatttaaaagattttattgtaattggccactctttaggtggtgcaagtgcacttcatttattaaatgaaaaattagcaaaaaaagcaattttagcagcacctataaactatgatatgcttcattctacaaatcaaaaagtcaaactaaaatgattattacctgaaaatctacaacaagcttatgaaagtatggattcacttgtttttgtagatagattaaattacaaacagaatctggacaaaactgctcaaagatttttcaactttatgagcataagaaaaccagtatttttagatatggtggttaaccaaattctaaatcctgattatcttaaaaatagcattaaaaatctttatttagcaaacaatgattacgaatttattataggtgaaaaagatttgtttgtaacttataattctattttatctgttgctttagaaaatcacaaaaaaattaattcaatacctgattgcggacatgcattattttttgaaaaacctgaagaagtaaatcaaattattgaagacattattaaacaagtgaattagttacgtttaatttaataaaacaaaaagagccattgaggtgatacccttttcttgaaaaaatttttgagtgttttaattaattataatttgaaatgaatgtttccctaaatttaatgggagacattcattttattctatctttaattcgtttgtaattgtaataataaatataatttgcaattgctttgtgaaatcgtttaaaagttaaaagttctttttcacgaccataaaaacattctctttttaatgtcccaaaaaacgattcaataacgctattatctaaacaatttccttttcgagacatagactgagttattcctttttgttttaatttttctgaaaattgtttatgttgatattgtcaaccttgatcactgtgaaaaattaaaccctcaagatttttgtgctttgaaaatgctctttgaagcatttttctaatttgctggttattagcgcgtagacaaatctcaagcaataacttcgccattaaacatatctaaaattggcgataaatatgcttttccaaatggtccgctaaattcagttacatctgtagttcatttttgatttggttgagtagcaacaaaatttctatttaaaatattgtctgcaattttgccaacagttcctttgtaagatttgtattttcttctaggacaaattgctttgagattgaatttttccattaatctgcgaacttttttaaatccaattttatattctctattattaagttcagcttttattcttctttttccatatcttgctttattttctcaaaaataagctttacttggcttataatttcttcatttttcttgtcaaaatcttcttttttgagttcataataaaaagtagatatagcaatagaaaactcttttaatacttgagttaagcgaagatttttatcagcttttactctattataaattttttttattttttcttgccttggttaatttgagtcaaagatctctaccaaggcttttcacttttttagaacttcattttccttttttaaaagtttaatttctttttcaaagttttttttctctttttttaaaatgtatgagttcttctttaagaagtttgagttctttatatacacatgttagagaattagattgatctttactatttaaattttttgaaacttttgaacgtttaccattaagaattttagatttcgttattggtcttcctttatttaattctaaaccactaattcccgattctaaatattttttcgttcaaaaagatattagacttggattaagattattttcaagtgaaattttaacaatttgttcaccagccaaaaatcctttaactatgtttaatctttgatctatagttcactttttatttcgtggttttttcttaagtccttcaactcctaatttgttataaattttttctcaaaaatttactggatttaaaaaaattttctgacttgtattagcaaaatcaggctttttaatttcaattccttttttgtatttttttacacattctaatttaaattctaatgaatatttcataaaaaatccccttttctatttttctaggaaaaggggatctgctcacataaatggctctttttgtttgttttttaatattttatttttttgctcttctttttcttagtaaaagcacaacaattacaactgggaataaaattaaaacaaaataaacaacaaaacaaataaaatgtcttttagatcttatacggtcaatgtcaatttctcttctgtagacttgaccaaacacagcatctatatttgctagtctttttctaattactaagtaatttattaatcctagaacaaacacaataccaacagcaacatacattaaaattccaaccaattgaggatttttaaaatgttttgttaaaaattctgaaactattttttgtattccttgaagaatttgttctgtattagaagttggttcttttatttgaacagtgcttaagaaaaacaacacagatgcaaaaattaaaccagcagtgacaaaatatgcagcaattcaacttctagttacttgttttaaagtaagttttttaacaatatttggcaatgttccaggcattgtgaaaacacttgaatttgccattaattgatctttaaatatttttatagctttcttagtagaaccacgatcaattgcgctttttacaaaactaaataaaaataaaatagctaaaacaattggaaagattaaaaatcactgactgtattgattattagaaaaaaatttgttcactgcttcacttggatattttgtttctaaaaatcttgtaacaataacaaaaccaagaaaagccaagcaaattaaagaaataatcatttgtcaaagaagaattctagtttctgaaccgaaaattttttttacttctttttctatgttttttattctgttttcattgtctaatccatttggaaattgtccataattagttggatatggactctgtgaagcatattgcggaggataggattgttgtggatattgaccttgaggatattgaggatattgctgagatggatatggttgattattagttggttgtggaaaattgggttgataattttgacttttgttattctttttaaacacttttaattcctttttttataaaaaatattgcttatacacaaaattatgctttatcttttgaaccgaattctaaaattttcttttcaatggtttcttccattaatttaattcctggtgcatacatttttcttggatcgtaatttttacctttttttacttcaccagagacaataaattctgtaattccttttgcgtttgcaagctgcaattctgtatttatgttaatttttgaaattcctagcttaattgcttcttgaatttgatcagttggaattccagagccaccatgaagaactagtggtaattgtgtaacaaaagaaagattttttaatgtatcaaagtctaaagattttcaattaggaggataaagtccatgtatatttcctataccagcagctaacattgtaacaccagcttccttcatttttaaagcttcttcttctgaagcaatttcacctaaaccaataacaccatcttcttctccaccaatagaaccaacttctgcttcaacagaaacatcttttttagaagctgcagcaataactttttttgtatttttaagattaacttcaaaactttcatgagatccatcatacataacagatgtaaatcctgttttaatagcagctaaacaagtttcaactgttccatgatcaacgtgtaaaacaactggaattgtgatttttaaaaaatccattaggttagttactaaattgaaaactgttttaactcctcccatgtatttaagtgcaccttctgaaattcctaaaataacaggtgagttcattttttgacaagttgtaagaattacttttactcattctaaattattaatattaatgtgtggaacagcgtatccgtttttatgtgccttttgtaaaatttctttagcatttactaattttttcatagcatctccttcatttttgtttgcgaaaattaatgattaacaaagttatgtcttaattttcaaacattatctcctaccatggtaaagttgccatccacagttagaagtttatataattcgcctttttttctaattaaaatttcatcaaaacttaaattaggtaattcttccttccattttggtaagaaatctttaagcattgaattaaataaatcattaaaacttaattgtgaatttaattttaaagcttctattgcagctgtaattaaagttttcatattacatcctttcctttatactcacacctattaatttaagtccaattttaagaacaattcctgtagcttttactaatgctaacaagtttttttcatttggatttccaattatttttgaatttgaataaaaagaattgaaagtttttgctaaattaagtaagtattgatttaataagttaattttataattttttgtaattgttgcaataatttcgttaaattccttcaaaatatttattaattttatttcattttcttcaaaaaaagaagtagcttgatattctttgatctctgattttaaaagtaattgagcaattctggcataagaatattgaataatataaactggattttgatcagaaatttggtttgcttggtctaaatcaaaatctaaattagtattttcgcttctattaatcataaaataacgaattgcatctttggaacaaagttctaataaatcttttaaagtaaaagaagtcccgcgtctttttgacattttaagttcttggttgttttttattaattttactagttgataaataagaaaatctactttgtttggataacctaaaatggataaagctgacttcattctctgaacataaccaatgtgatctgcacctcaaacatttattagtttatctggattattgctttgaagtttttgcaaatgataagtaatatcaggagtaaagtatgtataagtaccatcttgtttaattaagactctgtctttatcatcaccgaatttcgttgtttctaatcaaagtgcatcgtcttttttgtaagtatgttttaatgaacttaataaattatcaatctttttgtcttgataaagctttttttctgaagaaaaaacgtcaaaatgaatgcctatttgtgctaaatcttttttaatttcttcaagaaaaattttagttcctgtttctttaaaaaaactcaaaactccttcattttcaaggcttttttgttgatatttatcttttactaaatcaaaaacttgttgcgcagctcaaattatatcttggccaaaatatccatcttcaggcattgcaaaattaggattaaaaatttgttgataacgtgcaaataaagatttggctaaattatcaatttgcactccattgtcattgatgtaatattcacgaattactttgtttccagcatgttctaaaacatttgctaaagtcgcaccaatagcagcacttctaacgtgccctaagtgtaaataacctgttggatttgctgagacaaattctacgttatagactttattttgctttaaattggcaaaattttcaccttctaaaatgatgttatttactatattcgcataagatgtattagaaacaaaaaagtttataaaacctggttttacaacttctattttagtaagaaataatttgtctttgtctatttgttctactactttagttgcaaaatctataacatctaatttatacttacttgcaactaccattgctaaatttgttgaataatcagcgtgtgattttgaaggtgtaagaacaacattggcttcgtaaccgaaattattgattattttttgaagcacttgcttgatctgctcatctatttgcattattttttacccaccactacaagcgcaggtttaactactctatcatgtagtttataacctatagattttacttcaataatagtttcattatttgaaatatcttctacatgataaacactgtgaaaatgtgaatcaaattcagcacctttttttggttcaattttttctaaaccaaaagattctaaaaccttttctaattgtctatacaacattgcaaagcctttgacataattagaaacggcagcattatctgcatcacttccaaaatcaatggctgactttaaattagaaaaaggagaaataaagctttctaaaaatttttgtaaagaaaatttcttgatattttctttttcttcttccatttttttatgtacttcttcttttatttcttttacttttaaagaacttttggattctagttgttgaatcttgtttttaaattcgaattctgcaaattttgcttgtgtttctaatctaataactttagattctaaagcctgtaattgactaataagttcttcatttttctttttgacatcttctaaagtttcttctttgacttcttcaacagattgcgaattttcttttttttctgaagcttttgcttcttttatagttttttgtatctctttttcaatttcttttaatttagctgcttctttttctaaatcctctacaactgtttctgcttcttctaattctttttgctcttcttctaaagatatagaatttctttcttgaattaattcttcttcactaaatttactttttttcttaaacataatactcctttatactttttggatttttggttctttttgtttgtctttgctttctttactatttaataatttggtatctttattatttaaaaaatcttctaataattttattccggtaagtatcgcagaataattcattttctttgttgaaccaacaatacttagttcctttaagttagaagattgtggaaatttttttgaaataaaagatgtttcttgtgattctatgttaatctttaaagtttcttgcttgtcttctggatgaagcttttctaaaaactctcaaattgaatttttttctattatttctaagatatcaattaatttttgtcttgaaatatctttgtttaaaattaaagaatttttattatatatttgtgaagtatgttgcatttgaaaattaaaaatattttcaacaaaatgctttagtaatccatctgtatttttgatttcttgagataaaattggacttaaaatttgcaatgttgttgcaatttgactaatagaaatacctaaaagtcgttctttaaaaattctgatcgcaatttgcacatcattttttgaaatggtttcattaaagtgaataactttattttcaactttcccacttgatgttactaaaacaacaacacctgatgaatcactaataatagttaaatggattgacattaatttttcattagtattatttgttgttgttactaaagtaatatttgcaatatcagaaataattttaactgcttcagaaacagtttcgtctattgaagtcctacgttttgcaaaaatatcttctaatttttgctgtaaatcattattagtatcatttgctaaaaatttagcataatattcataacctttaagagtaggaattcttccactggaggcatgagatttttctaaaaaaccttctttttcaaggaaaagcatcgcatttctaatagaagacggcgcatgatctaagttgtaaaatttcttaagattttttgaaccaactggctgacctgttttgatgtaaagttcaataatatattttaaatattgtgctgtcttaacttttattgaatgcatactattttgctaaagctttgtctacttcttgaattaatttttcttttgggcagtattcaaaatttttgaataaaatttctccatcttttaaaactaattgtgttggaacttttagtacttcaaatcttgttccttgttttctaaataaaccagattcttctgcgtctactttaattatttgtacgtttggattgtctttataataatttgataaattttccataactggagccatcattttgcaatctccacatcatgttacataaaattctaataaaacaacacctttttcaattttattttgagcatcttttcaaagtaatttttctaattgcatttttataactttcatctttaggaaaaacaaagttttgcttcttttttctttctaaattgaagtttttctcctttgtatattgttattttttgttaattttgttgacttttttaaattggaaattagtttatagccaaagtagattagtcataaaactagtaataaaaaagatattgaaattataccatattgtgtaaatatagcaccaaatatagcaaagcttaaaaaagataaaaaacctgcatttcaaacaaaaggatgataatcattattggatgaagtaaataaattccatcaagttataattgaatttttggctaaaaatttagggtcaaaatccttcattgttaaaaaatattgaaaataaatgcttattcaattaattattaaaaaaagaaaaatcaaaaagaaaatatctttagattttcattgaacagctgtaaaaatcaaggtagttttgtatttaaaagttataaaaattacaatcaaataaatcatcggagtatatcaaccaaagacaactccaaataaataatcacttaaagtacttactccattaacatcaataaattcactaacaaataaaaataaaaaaactaagattattactatttttgtagcaatcaaagcaaaattagaattaataattttcataaaaagcaacaataattacaggttctttatcaatagctttaaaaatttttcttttaatacttttttgaattttttcttgtacttcttttacttgattatcacttagtcttgtttttgaaacagctgagaagtgagtataaacaacttcgtgaataattttgcttactttttctttattttctttagttaaaattccgtatgaattaataattaactcagaaattaaacgtttggatttagtatctaataaagcacaaactacaatagttccatctcttgaaagtgcttctctttctttgataacctctgttgaaatatctccaactccaaaaccatctactataacttcaccagcgttcttaatagaatgtttttgtgaaattagttgtccatcaagaaaaaaagcaacttttctattttgtaaaattatgatattttctcgattaatgccagcacgttctgctgtttttccagcgactactaaatatctatataaaccttggattggaataaaaaactttggttttaaagcttttaaaacttcaaaaatatcttcttctgatggtcttgttctataaaattgggtttcagtaatatcaactaattgttttgctacttttgcaatttcatctaaaactcgagaatgtaatacttccattccgttaataggtggagctaacataataacagaatctgtttttttaagcttaaaaaagacatcatctttttctaaaattctaaaaaatctttggtaaattcgctcaggtgttgatgtaattaagattacagaattatcgattttattagcttgcctgaaatcaaaaaattctggataatgtatttcaagattttgtttttgtgctaatcgttgattcatttctaaaagattgtcataatttctaccatatacagcaactttacgtttgtatttgtaagctaaatcaaggatttcttgaattgaaagcatctcttcatcgtatgctccgacaattattcttgaagtggattttgttgttaaaaatgttttttctaaaaactttttagcaaaaattttatctattgttttacctggataattagctcttgttgagtcaatcatagccatcaaaattggtttacttgattctaatgatctttttaaataatttaaattagtatttccgtaaattcctaaatttccaacaataaaattagataaaaataaaattagtccatcttctgtttcgaagttataaccataaattccaggaattgatccagctaattgaatgggtttgacaaaaacatcatcatctattttgattttttttgtaagtgaaacaatttcatattgattattacttattttatattttgttagtctttctaaaattaaagcttttgtaaatgaagaacaataaattttaattttaggaactttcataattaatcaaggaagtgccgaaaaagattcatttttcacatctgttagaaaaattcctttaacccttgaataattttcttcaatataagtaaaatcaggaataacagtgtctattcctaatgaattactaagtggaattttagctcctgtgttaattaaaaaaatcgaattatcaatttccaaaacatatgaattttttccattttcatcttgtccaccaagtgcgaaaaaactaatttttgccatttatctcctttaattttgatgttttttataaatttcttctaattttatttttgtcttttttaatgtatcaaaaacagcagatctagtaactgctaattcaatagctacttcatttaatgaaagatcttctacaaaatataaatgaaaaacttgcttttgattttgagttaataaaaaagaatattttttaaataaatttagtcaatattcctttttttcaagtaaagcaagttctttattgttgttcatattctttaattaaatctttggttagtgcataaataaagttatctaaattaaattcttgtagatcatccattttttcgcccaaacctattaatttaacatccatatctaattcgtctttaattgagaaaatgattcctccttttgaggtaccatccatttttgttaaaactattccagaaacaggtgttgcttctttgaaatgttttgcttgtgatattccattttgacctgttgttgcatctaaaactaatagagactcatgaggtgcatctggatatttattttgaattactttattaacttttttgagttcattcattaaattcactttattttgaagtcttccagctgtatcgatgattaaaacatcgtagttttcgctttcagctttttctattgctcgataaacaacagaacctggatcaaattcatttggacttggttttagtatatctgccccaacacgatttgcccagatttctaattgttcaacagctgctgctctaaaggtatctccagctgcaatgagaatttttttaccttcttttttcaattgatttgctattttggaaattgatgttgtttttcctgaaccattaacaccaatcattaaaataatgtttaaccttccatctttaatatttaaatgagtattaattatagacctatttgcataaatggtgtacattttatctgcaattaactcgttaatgagtttagaatcagaaatattttgtttttttacttcctttttaagctcatcgataattacatcaacaaaaaaaggagaaatatctgacattattaaaatttcttctaattgttcaaaatattcttcatctactttaagttttgatctttgtaactcaattaattgttcagaaagtgaaatatttgcttttgttaaaccagcaacatatttatctattttttcttctttaagttcttgtttttgcttttcaacttccttcctttgctttgtaatttcgtctaattgtttttcttcatctgtcttagaacgaccaaaaattttttcttttaatcttttaaaaaatgacatgttctttaaattataaattaatttttgtttttgcttcttttgttggagaatttttcttgattttttcacaaaattttctttttttccttggaaaatatagaatttttattaaaatatttaaacattatttaaacagcgaaatggtatttattttaaaattttaaatttgctttaaatttgtgagtaagaatgctgttatccgaaaacattaaatttaaaattcaaataaagaatcattttcctttttattaatgaaaaaattattataaaaggagaaaaattatgtcacgttatacaggtcctgtatttaaaaaatcaagaagatatgggttttcaattttagaaactggaaaagagtttgttaaaggaaaacaaagaaaatatgctccaggtcaacatggacaaagaaaaactaaattatctgactatggattacacttatacgaaaaacaaaaagttcgttttatgtatggaattaatgaaagacaatttagaaatactttcaaaaaagctactaaaaaacacggagttgcaggtacagttttcttacaaacattagaatctagattagataacatagtttatagagcaggatttgctgaaacaagaagacaagcaagacaattagtaaatcacggtcattttttattaaatggtaaaaaagctaatattccttcaatgattctttctgttggagatacaattgagttaacaactaaaaaagaaggaaaaattagaaaaaatgttcaaattcttgaagctcttgaaaaaaacagaacagctgaatgaattaaattagaaaaagataaatttaaagcaacatttgaaagattaccagaaagaaaagaattaaatccagaaattaaagaatctctaattgttgagttctacagcaaataatataattattgtaaaaccagaagaatactttcttctggttttattttgcttcttttttataggatttactaagtaaaaatgctttctgtaaaatcttttgtacttcatttataaatattaatcatagcttttataaaagcaaaaatttctgtattatcatcataaccttgttttaaagaatgtgaattatgaaaatctcttttagtatttcttctacaattttatccacatttttaaagtaaaatgaaggtgtttctatttttgaacttccctggaattttgtatattcataattaaaatcattaatttttttaagtttatcttgcttagctaaaacttctttatacatagcttttttaaaatctttaaaagttttgtatttataatctacattattgagcttgaaaattttttgaaacacttcatcgtatgtgagtctgtttttaccaggctctaacatcatatttgaaacatagggtggcattcctttttgataaccaaaagctgcaagtagttcaaaagcaattcttctaaaagagtaatcacctggcgaacctgttttattctctgctgtagctcaaaaggctttaaacattggaatttggtagtatcaatctttcctttgaataccatattttaaagtgtttgtgggcgtaaaaattattaaatcattatctacaaaatcatttatagaatttaaattcaacctttttatttcttctttatttagtttttgtatgttattttgaccacttgaatctgttgtaattttggctaaaaaatcaacagctctttctggcttattttgtgttaattgaatcagtgcttttgcttgtgtagcttcaagtaaataaactaaatcaaaaagatttttaaagtaattttgtaaatcttgttctgatttaaattggtatggggttgtgtttgttaacttgatatttcattttgtttgtctattatatttagttcctattatttctttatctttaatattggaataatctttgattgtattaataccaaaaaaatcttgatttgcttcataagttgattcaaataaacctcttgcaaatagttcaggttcaaggtctaatcgtctttgatgattttcaaataaaattgttctatcacaagcgtgagtaagttcgtgtgaatatgttgctcaaccaaaatctgttagtattctagcgttttgaaaatggacaatatcttgtgtttctccataataagcttgaacttctcctctatgtccttgtgaatttgagtaatagtctattaaaggaccaaaaaaattatagtatgaagcaatatcataatcttctcttggatttaatcatctatttttctgtttttgatcaaccaaattaaatccatctactattaatgtagttctaaataatttcatttttgattcattagaaattatcctagatcaaaaatcagaccaacttctttgagctgtagctgtttgctggattttttcttctaattcctttatttttgaatgattttttaaatttatatagctttcatacatacccacagataaagaatttatagttgaaattatgtaaaaagtttgctctggtaaggtaagtaaaacgggaattcaggctttgtaatttgagtgattttttaacttaaatcaaattttgtttactttgctttcatcattagattcttgtaatttttttaaatcatcatattttgaattttcttcaactatgtaggctttggttgtatttttaaatcaagtatttgcggctaatgaagaaatatttaactgattttctatgacttcaaaatatgttttatttactaatgatttaaaattctcatcaaaaaagtaattatattctttgacttataagtatctttatcaactacaccttgtattttgtttttataatatctagaaggatatcaatgtggaagatattgtttaaaatcattaggtaaatctattaaataatctagtattaaaacttttttatttttattaaatcaatttgaaaataaaagtcaatttttaaaatttcacctatttatattaaagttaaatcatctatttaaatatgaaagaataaatactaatttttctttattttcttttatttttgtagctaatctttgtttttgatcatcagtaatatttactgaattaacataaaaattaaaaatattagaaataatttcttttgctttaatttttgtttcgttaaaagatttttctaaaaataattttttaagatcagtattattagctgataacaaaccattataactatctgaatataaattaagcgtggataaatcacctaaatctaattgaactgaattttcattattgacaacgaaagcaatatataaaagttcattattattgttttttattttatattctacaagattgttttctgttttaaaaaattcaacatcatatatttttgtaaaattattttcaaatcttatttctaattttttaattaaattatcttgattatgattttgaactacttcattttgatcatttagatttattatcgaaacgatatttttgccttcgaaaaaattcttcatgttttcttctattggattatttttatcgatagaagcaaaaggcattgatgtatgtgaaatagaattagaaattggtttttcaatttcgttctgcattttttcagtactattttgtgaaatttctacatcttatttatttaaattaattgtatcttttgaaattgtttctgtattcgtacttatttttataacttcgtctttgtttttatcttcttttgttttagtttcaactaaagaaatatgatttttatttggttctgtaaaaattacttttttgcttgttttttcttcattttggttaggattttcttggataacatcttgggatttagtgctattttcttttttgaaaagatgaatttgtttgattatgtgaagaattgaaatctgtgttttttaaatgaatatctgtttttggatgatcagacgttttattagatttgtgggtttggcttgtttctgtattttcattctgatttttatcttttaaattattttgtggtttatcttgtgaatttaattgtccagaaatattattaagtcgagagttctgtgaaggctcttctgaggatttttctttattttctttattaatttttaagttttgagaaactgttatgtttttgtttagatttttatctaaatcgccgagtgtactataatttttgttttaatttttgtttctgttttttcagtagttaggtgaagagatttgtcatcaatggatatcttgttttctggttgctgaatctttatgattttaggaataatatttaatgatttgttttgtaagttttgattatcgttttcattgtcagaaatattgatttttttatcatctgaagaatcttttgctttattatctttgctttttttattatcttgtggaagcaaacaattatcattataaatatttaaattttgcttttggtcttgtattttgggcttagaataaattattcctaaagttgtagaaatagtaatgatagatgaagctaataatgctgaaaaaatgatggtaattttcttcttagaacttttcatatttttatattataaatgaagaaatttaaattaaacttcaatttcatcaggatttgtaatctgcaataaaatgtacaacattattcttttaattctactacttgtatatcgtttagaattaactctgttaataaacgaatcaaaatcaggagcgttaatatgttttttaaaaagattttggattccttcagaaactaaatggaattgagctaattcttcagaagatttttctctaactattttttgaaactgtggatagtgattttcgattctgtcaggaatagaaataaatttcatagggctatattgtgaaatgtcttcatttttatagattaatttacgtaaataagatgcagaagcaaaatgatcttctggtgtttctgagtgaaaattaatagttctttttagacagtgagccttaatactataattattaaaaacaatggctttaacatattcaaaacctaaaatatcattaggtaaagtaataagtgatcctgttaattccttaagagctagtgctgaagcatttggaaaagaattgccttgttttaaaaacatttttatgagttgattatacttttcaaaattatttttaattgtagtagctaaaaaatacatttgatcaatattatttgattcggaaccaaaaattaatttatctattttattttctgcaataatttctatagccccttgagcaaaaatatgagcagcttgagttgcatatttaaaaggtaattttataacttcatctgctccgaattttaaagcaaagtgttttctagtttcaaaatcagctactgctaattctcctctttgagtatattttccgcttaagattacaacaattttttcatttggaaaatgttttttaacataatttaactggtaaatatggccattatgaaaaggattatattccgctattattgctattgacatattaaataattatattatttttgtaatatttcgaattaaaaataacacccaattttaggtgttatttataaattattgttgaatttctatatatgaattgatattatgctgttgtagtagttgttccgttaatttttttaattaattcgtttaaagctttttcattatcttttgcggcattttcattaattaacattgtaggaatacctaaaacacttttgtaatttgttggattagcttgaatttgagttttaaaatctgctgttgcttgatttaaaaattcttgagcttttgctttatctgcttctgcaactgtagaattagaaacaccaacaaaatcatctgaaattcctttataaactgtagcatttgctggatttgttaacttaaatgatctaaatgaacctaaaaatgatgaatcttcttttttaagataaatgtcagttaatacttcgaaaattgttcttcctaaacgtttttctactgaagtaaagaaagctgtagcaggagaaagagctttagattgatctgtatctactcctattaagtattttgttgcatcagtggattttttaattgaattaactactgaacttgttaatgaacctgctactggaaaaataagtgtggatttacttactaaattattaataagtgtagaagtggtagtattagccacaaaacctgtatcaatattaattgtgttgtctgctatttttacttttgcagttggattatcagtattgtattttgctattccagctaaaaaaccagcaataaagtcagtaactccggctccatgtcctcctccaaaaggagaaatagttctttttgtttcatcgcttgggaatttatatgctaaaaatttagatgctgcataacctgcaatgtaaccagcttcttctgttttatataataatgaaataaaatgtcctggtttaattaaatttttatcttcatttgataaatctcagtctactgcaattattattacatttttgtctgataataattcagcatatgttttaccgtcaggagctttttgttttaaaaaacttggaaactctataccttgttgaaaaccagttaaaattcatacgttttgttttccactaaggaaatttttatatttaccaataagttcagattgattattagtttcttgtgaaactctatcttctctaccagtttttccaatttgaatgtaatgatcctgaacagcttctcaaatggattgattaaatgatttatcctgaacggtaccaccagctgttaataaaacagtgttgaagtcaaatactttattatctttttttgcatttgcgacttcttcttttcttgtgtcaacaaaagaattatcaaaaattctagttggtttggtagtttctccacaagaaacaaaagttgctactgatgctactgttgatattgttcctgttaagaataataatgattttttaaaattcataaattcacctcacttaataattaaatgtacaatttaaaaacataatataccataaaaacaaaaaaaatataaagtttttgatcttctacctcaatgatttgtcataaggaagaccgactgcttttggagcaattgtattttttgatgtaaatattaatattattaatgttactaaatatggtaataaatagaaaatattttgataagttttaatactttcgaaaattccacttccattacctataactgtagtaactgaataaattaaagaaaatataatagaagctattgctatataaacaacttttcatcttcccataattaaaatcgttaaagcaataaaccctaaaccactaacatttccactaaaagctacacctaaatattgtgatcagatactacctgcaattcctgctaaaaatcctgagattaaaacaccttgtcatttgtagaaattaacattaatacctgcagcatctgcagcttgtggattttcaccaattgattttagtctaagacctcattttgtgtacttaaatgctataaaaatgaagacaaaaatcaaaattgtaataactacttttaaagaaataatatttaaaaaattagaattatctgtagaagccgctagttcttgtaaatcatactgaaacttttgtgcatttgctccggtaaatcttaaaagtaaaacagaaattgatccagctaataaattaatagctactcccgaaattatatgattacccttcaattttatagtgataagtccatgaagagctgaaaataacatcgtaattaatgaggctagcaataacacaactagcgacattattggactagtagttttaaaagattgtgctaataaaccaaaaaacgtagctcctattatcatcatcccgtcaattgctatattaacaattccaactctttcactaaaaaatccagaatatgtagcaattaaaataatggaaacaaataaaaagaagaaaattataatttgatttagttcaaccatattactcaacctcctttttagattttttacatattttagctttaattttgtttattgtaattattactttttcttcttctatagctaaaaactcttttaaattcttcttaaataaagtgtttaaaacaaaaatattagctttatgtttttgtttttgatgttttaacttgttataacctaaactatctaatttttcatctaattgttttcttttttgatgtatcttactaaattcagcaagtgtttcatcatctgatattttatctttagttgaatttagtgctttgatatttttataattatttaaaaactcattttctaattctgttttcaatttttttcattctgatttgtgttgtgcaatagattgtttaataatttttttacttaaacaattatgtttaaaatgaagaattaataaacgaagataagtaggaaataaagcaagatttcgttggttatattcgttgtttaaataatttattttttcttcaattatttgaacttttgcttctaaaagttttgaattcttccctttttctgaactagtttttaacttactatctttttcttttttgaaagcaattcattgttctttttgtttagattttcaaaatacctgtgcttttataaataaataagctttataaatgaaggtaagtggtttaaattttgtaaatacaattgaaattgctgataagtaaactacaataccaaaaatgatagaaattgaatttgaatcaagattataatcaatactttgtaaattggaacttccactaaaaattattgaataaaatagagaaactaaaatagaaccaattggtgaattataagctagaagtgctattaaaatagtgtcaaaaccttcttttagcggtgctctggcactgaataacatatttttttgtaaaatcacgtatcataaaaatccagcaacaccagcaattaaagcagagaaggaaagagaagaaataacaaggaatttttcatttgttccggcatattttgaagcatttaaatttaatcctgacattttgattttgtatccaatagtagttttttggaatacaaatcacattaatgtggcaaaaattaccaccgcaaacaacatcataattataaaattgttgctagttgtaaaagtaggtaaagtgattgattgagaaacatcatcacctaaataaaaatttcatagtttagctgaaaatatttgataaaacaaataaaaaattattcaattaagtaaaatcgttgaaataacttcgttaattttgaaaaatgctttaagaacaccagcaataaaaccaataaatgcactaaataaaattccaactaaaaatgctaagaaaatgaagccatgtgaaactggttcacctattttggctgaattaattaaaataagtagcgacactccaccagccgtcatcatttgaccaggtattcctatattgaaaattccagctttaaatcctgttcctacagctattccaccaaaagtaaatatgacaactaacaataaagtgtcataagtttttaattctgaaaacgcagtattaaaaatctcttggattacttcagatggttttgcagttgatgaaataaaaataaaagcaattaatagaccaaaaaagatagaccataatgaattaaaaacttttcttcttgctgaaatactttcattattgaaaataaaattcattatttttgacaaattaaattcttttattttagtaaaaacattagtcattatgcacacctcccatcaatattcctatttgttctcttgtcatactttttgcacttcttttttcagatagtttacctttatttataaccataattgaatctgctagtgcaaaaacttcatcaagttcgtatgagattaataaaatacattttttcttctttttttcttctaaaagatagtcataaatctggttaatagcaccaacatctaatcctctagttggttgaacaacaactaataatttatgctctgaaaggatttcacgacctactactgctttttgttgatttccaccagataaagatcttgcaagtgcatttccgtttcagtctccacgtacgtcaaatttttcttgaatttctttataaaaactttttaaaactttgttttttataaaactaagtttttgaaattttggattataaagttctctaataattgcattttctctaatagtaaaatcgagcacaattgcatatttatgtctatcacctggaatgtgtgaaatacctgctttgtttttgttttttactgaaaaatttgtgatatcaacaagctgtcctgagttgtctagaatctcaatttttccttcttttggctttaaaattcctgaaattacaagctcaatttcttcttgaccatttccttcaacacctgcaatacctagaatttctccttctttaatttctatgttaatgttggaaatttctttgttttgtttagcgaaaatatcagtcatccgaaagcctgttttttctgataaaattccactttgattttttggtattacaacttttttaccaaccattgcttctgataattcatcaatttgaacattatctaaagtaggaaaatgttttacaacttttcctaatctaataactgttgcttcattagcaaccgattttacttcatgtaatttatgagatatgaagataattgtttttccactatttttgaaaaaacgtagaatgtctaaaaatccttcaatttcttgtggatttaacacagcagttggttcgtcgaatactaaaatatcagaatccttgaaaagcattttcataatttcgactttttgttgggtcgaaactgttgcatccccagtcttctgatctaaatcaaaatgtaaattatatttattttgtagtagtgaaacttttattcttgccaactcatagtctacaaaaattttattttttaaaaattcactacctaaaataatgttttctaaatttgtataagcatcaattaatttaaaatgttgatgcaccattcctattcctaaatcttttgcttcattaggactctgaataaagctactttttccatttattttaatactaccttcggttggagtataaattccaaataaaatcgacattaatgttgatttaccagcaccattttcaccaattaaggcgtgaatagtacctttcttgatattaatgttgatgttgtcatttgcgacaaattctccaaacttcttagtaatttgaataaattcaattgcattttgattgtggtttaacatagtttgaattatatagtttttttttattattttaaaattaaaaaattatttattgttttttttaataatatttattaaaaattctttagttaattggtaacttatagagttttggtctaattttggaaaattttttgacattaataatcttcctgaatttttattaaaaattgaacttcaatttctatcatcttgtttatgcccttgttgaaaatctacttcctctagaaagaaagaatagatgttattaataataatttttctctgctgatcttttaaagatttatcaaatttataatttatttttaaaattaagtaaactttaatttgttcaggattttcttgtacatagtcattatgcaataaattcaaagctgctatagcattgttatgtgaattaagtttttctactttaatatttaacataacaaaaatatttctaaatatagcatatgagtcataactagattgagttgtacttatctgttttttatgaataataacttctttttctttgtgattttttgtataaatagatattttgcttgttaaaaattcttcaattataaatcctatagctgttgaagattcaatgcaattattttcatcttctaataagttgtaatcttccaattttaaaactaactcgttgccataagccttaaaaatctgttttgcataattttcaactttgctttgtaatacttttaaatttctatagtacattatttttcgtccaaactttttttaatcgcaaatccaattgcttttgctagtaacggaggaacagcatttcctatttgcacaagttgtcattttttagaacctttaaaaataaagtcatctgggaaagattgcaaagctgctaattctcttggtgttaaaactcgtggtaattttggatggatatttacaccaccatgattttctttaattgtacagctaggttcatttcaaggagatttcttccacccatctgaatagtttttataaacactttgtccttcaggagtatttttgattctttcttgcatttcttttgaatgttttgtaaaaatatgatttatttctttattttcttctaaatacatatatttttcaatacattcaccaagagttttatattctttttgttgtaatataggttttgggaaataattaattttgttaattttatttgctataaaaattactctttttcttgtttgagcaacttcataatctgcactatttaaagtggtgacatttatctgatatcctatatttttatagtcatttattattttttgttctacttgtccatttaacattgttcttaaaccttgaacattttccataagaacaaattttggttgtaaatttttaactatttctaacatttctagatatagactatttcttggatcatcaactactctatttcctgccatagaaaaaccttgacaaggaaatcctcctactattaaatcgatatctgtatctttaaatttattataaagttcttcttttactttaacatctctaatatctctagtttcgataagttcttcttttttctttctgtttttgaaattatatacataagtttctactgcgtcaggcataatttcaacactagctattggttcaaaacctgccataactaaaccgcaagataatccacctgcgcctgaaaataggtctataaatttataaccatttttataattagaatttcaaccatctaatttattcatttcttttagcacatcaatgaactgaactttttcttcaatttttcctatttttttattactactagcttcttttttataggataattttcaatcttgataatgtgagtctaaaattaaacatttattgttttgttttgtagaaatcaaactttttttagctatttcttttctaatgaatttttgactcacagattctaatttagcaatttctgaaattttataatatttcattttagactcctttacattgtttattgtacaaaaaatttttctttaactttaaacaaaaaataaaatcatatattaatatgattttattttttgttatctgtatctgtttttaaaacagctaaaaatgcttcttgaggaacatctactgtaccgaaggatttcatccgttttttacctgctttttgtttctctaagagttttttacgacgagtaacatctccgccgtataatttcgctgtaacatctttacgatatgctttgatggtttctcttgcaattacttttgaaccaataactgcttgaactggcacttcaaaggaatgtctaggaattgtttcttttaatttttcagttaattctcttccttttttataagcaaaatctttatgaacaataattgaaagtgcatctactttttgaccatttaataaaatatcaagtttaattagatttgattcttgataaccaattacttcgtattcaaaagaaccataaccttttgacattgattttaatttgtcaaaaaaatcaaaaatgatttcagataaaggcagaatataaactaattttcttcttgatttgtctatgtattctaaggattcataaacccctcttttatcttgacacaaacccattatcgaacctaaatattcttcaggaacaaaaattgttgctcttatataaggttcttctattttttcaatttgtgttggttcagggaaaaaacttggatttgaaatagaaacaacttctttattagtttttgtaattctaaattctactgaaggagcagttgcaactattgataaattaaattctcgttcgagtctttcttgtaaaatctccatatgtaaaagacccaaaaatccaattctaaaaccaaatcctaaagcttttgaagactcaggttcgtaactaattgaagaatctgaaagcgaaattttttctaatgaatcttttagtaaattataatcttgtgaatcaacaggataaaaccctgtataaactacgggctttaattttttataaccagaaagtgctacttttgctggatttgcaactaaagtaatagtatcaccaacagaaacatcctttgcgtttctaattgaagctgcaattcaacccacttcacctgcaacaagctcttcttttttaagctcttttggagttcttacccctaattcaatcacaccaaacttcttaccatttgccatgaacttaaattcgtcacccactttaatagaacctgaaacaattcttactaaaataattactcctctgtaaatatcaaaataagaatcaaaaactagagcttttaattctttttcattttcatccacttttggagctggaattttattaataattgcttctaaaacaacttcaatatttgtaccatttttagcagaaattaaaatcgcatcatctgttggaataccaatagcattttctatttcttctttaactctgtcaacatcagctgctggcaaatctattttgtttattattgtaattatttctaaattattttctatcgctagataaacattagcaagtgtttgagcttcaattccttgagttgcatccactagtaataaagcaccttcagtagcagctaatgaacgtgaaacttcataagtaaaatccacatgacctggagtatcaattaaatgaaaaatatagtctttataatgaagttgaactgcgttgagttttatagttattccacgttctttttcaagatccatagaatctaagtgttgggcttgaagttctcttttttcaactgcattagtcaattctaaaatacgatctgctaaagttgacttaccatgatcgatatgagctatgatagaaaaatttcgaatctttttgacatccataattatttgttaattggtgtaaaaaatgtggatgattgaacagtggagattaaggagtgttgattagcgttggctttataatgaatttcagctactggacggattgaatcattgtgaatatcttgttgtgatcaaatgatagctcaaacaataaccacgattgcaatcacgattatagaaactaacaaaaagaacagtgcaactctttctgctttgtgtctttctttaaatcttaaaaatctcttataaaagatgatgttttcttttggttcttgaccttcaacatctaatttaattggatgtgtttgaatattagtatcttcgatgaagtactcttttgcttcttttttaaattttgccattttaacaacttttatttcaacatatcttttagatttttagaaggtttaaattttgcaaccattttggcaggaatattaacttcagattttgttataggattaattgctgtactttgttctttaaaaacaccttggaatgttccaaatcctgcaattacaaccttatcccctcttttaatttggcttgttacaatatcaaaaaatgagttcaaaactgcttcagtgtctttatgtgtaagttgagtttcatctactattaagtctaataattcttttttgttcataatgatttcctttgctttgtttgggttaataaattatttatattttactttattttctttatttttcttttttatttttataaattattttaattggacaacctgaaaaaccaaaatagtttctaaattgattttcaatatatctttgataagaaaaatgaattaaatttttatcattaacaaaaaataaaaaaataggaatatttgcttgaatttgttgagcaaatttaatatttaatttttttccacgaacacttggtggaggttgtaacatttgaatatctaaaatgaattgattaagggcattagtagaaacttttttatctaaattattcttgacttctaaaattgtttctcttaatttagaaattctacttcctgtttgtgctgaaataaaacaaattggagctcagtctaaaaacttgtaattttgcttcattttcttcataaaaatgtgctgagtgtttgtttctttttcaattaaatctcatttatttactactaaaattattggtttttgtttttcaaaagcataacctgctaaacgagcatcaaaatgtgataattcttgtgtagcatctattaaaatcaaagataattgagcatcatctagtgaattaaaagctcttaaaagtgcataaaaatctacagattgggcaattttggattttctaataattccagcagtatctataatttcaaaatctattttgtcaattttaataaaactagaaactgaatcacgtgttgttcctgctattggagaaacaatggagcgattttcatttgctaatttatttaataaagtagattttccagcgtttggttttcctataattgccaacctaaatgcttcattttctttctcttttgtaaaatctaaacttctaattgtttcatctaataaatcaccaactccttctccatgaatagctgaaattggaaaaatatgttcaaaacctagtgaataaattgaagtatcaaaaaatttgtttccttctagtttattagctgcgattaaaacttttttgcttgattttcgaagcaaatctataacaaaatgatcatctgaatctatttcaactctaccatctactaaaaaaataattaaatttgcttcttctattgctatttgagtttgaattctaatttgttcttgaaatgatttgttttctatttcaattccgcctgtgtctatgagataaaattcctttcctgctcattcaacttttgaataaattctatctcgagtaacgccagggctatcgtgaattattgaaaccttttttcctactaatttgttaaataatgtagattttcctacatttggtttaccaattagagcaacaatgttcttcattttatagtaatttctgttctacaagtttacaaatttgacttactacttgatcaaaagttaaatttgttgaatcaataaaaattgaatcttctgttttatgaagaggattaacttttcgattcatatcattttgatctcgtttttcaatttcttctaaaatactttgaaaattggtttctaaattaagttctttgttttgttcaactcttcttttagctctcacatttgaatcagctcatagaaaaatttttaattctgcttgaggcataacaacaaaagtagtgtccctaccttccattattattcctttgtgattttgttgaaaatcttttaaaatatcaacaattaactctcttatttttggaaacttcgctattaatgaagcatttttagaaataatatctaatcttaattcatcatctactttttgcttttctagtaaaatagaaccatcttctaaaagttgtaataaagaattattccagtgtttcaaaattgatttctcattatcaatttttacttcatttttataacaaaaataagcaatgactctatacaatgaaccagtatttacaaataaataattatatttttttgcgattgtttgagctatagatgactttccagcacctgaaggtccatcaatagcaatattaatttttttgtccatataactccaattattgttaatatttaataataacaaattttaagtttttacaaacacaaaaattaattattcttagattgtacctgtttgacctatagaaataaagacagaaattagtccataaatagctgatatgacaagagctagaccaacacaaatcactaatccgactgcaaaatattttcacaaagtttttaaattaattttggctatagaagtttgattttgtttacgtagtttgagttttaaattgtttaaataatattcaaaattcataattatcctttaattgttgaaccttgttttgaaatagcatttaaaattctttttctaaatccaaaatagattataaacatcggcagaattgctaaaatagctccggccattctaatattttttaaaaatggaatttgaccctcatcttctgctggatttctacccacatctagtaatcaaatattaataactttaatattagaatttccttctaaaatcaatagtggtcataataatccatttcaagctgcaaaagctgtaagaatacccactgttcaaattgttggactaacaagtggtatagctaccttgaaaaagaaggaaatatttgaacatccatctaccatagctgcttctttaattcgatctgagatttcttcaaatgcatttctaaacataaatccagaaaaaactgatgctgcaaaaggtgcaactaaagctaaaatggtacctggttgctcatttcaaaataaaataataacaacacgatattgaccaattaataaagctgtttctggtaataataaaatggataaaaagattaatcaagaagtttttttgtattttcactttttaagtgaaaaagcataaccaaatgttattgaaaagaaaatttttccaattactgaaattaaagtgattaaaattgttcaacctaaagcttgaccataaccttcttgaaaagctgcagaaaaattacttcattctaaagagcgtggataataaatttgaactcttgaatcaataacttgctctttgggagctagtgcataagttatcataaaataaaaaggaaaaatgatgaagataccaaaaataaataaaactacaaatttaaatataaaagaagcaacattttttcatattgaggtttcttttacttgtgaagaaattaactctgctgctcttctagtttttaaaattgctaacttatttcttaagaaaatgagaagctttaattttgttccgtacatttctttctcctaattttgatatgatcaataaaattgtgtttattccttttttgagcacaattgaaagagctaaaccataaataaacaagtaaattgtggaaactccagcgaatgtgaagtttgagcttctaacttgcttgtaaatataaagtaaaattgttgaaccaccattactttgggcaatatctgcatcagaaaaaataccaattggaaagactttgatacctccgattattcccattgttattaaaaaattaattgttctagatactgaaggaagtgttattttaaaaaattgcttaaatgaactagccccatcaattgaagctgctttatacaatgttggatttacagataacattgcagttgttaaaattaaaacttgaaaagcaagtgaacgtcaaattcctgaaaacaatataactactaatgcataaaacgaatttgcatctccactatttagtcatcttgttttactattgaataaattatttacaaatccaccttctgttgcaaaaacataagaaaaagctaaagaaacagcaattcctgatgtgacatatggtaagaagaaaattgtttgtcaaaaacctcttgcccatttacgataaatacttgcaattgttgaagaaattaaaagcgaaatcattaaagtaattggaagagaaacaatagcaaaaattgttgaattccttattcctaattgaaaaaatggatcttctaaaacatcactaaaagctgaaaatccaaagtgaactaaagacttgttattttcatcttcatttaatatcactgattctttaacagcatagataaaaggaagtaaagtaaaaagtaaaattattaaaattgaaggaagcaataacaaaaatggttttcaaaatttttgttgcttataaaggattccaagctcaaaatgtgtttgtttttttaacaattttaaacgcaacttgtatcacaaattcattataacctctctcttgtttcaatatcaaaaagatgaagtttagaactggaaaaattgaagaaaatttcctcattttttttatagttttctttatttttcaagaaaatattaaatgtttctacattatcaacaacaactttggctagaatttcttttcctaaatattcaacagaatctattgttgctttaaacatatacttatcttgttgagtttcaattaaatcttccgctcggattccaactctgattttgttttgtttgtaaactatgcttctttttgcaagaatatccactaaaaatgaaaattttatatcagttaaatctgctgtaaaaattgacatttcaggaacacctaaaaattttgcaacgaactcattttttggataattataaagttctaaaggagaacctatttgttgaatttttcctgtagacatacagacaataacatctgatattgacattgcttcttcttgatcatgagttacaaaaactgttgttattcctatttcagattgaatttttttaattcattgtcttgtttgaactcttagtttagcatctaaattagaaagtggttcatccattaacaaaatttgtggttgtctaacaattcctcgtgcaattgcaactctttgttgttgaccaccagaaagttttgttggttttttatgtaaattttttgtaatttctactttttctgctgtttttaatatttcattattaattgctgtttttaaagaaatatcttctgctttgaacttttcatattcctctttttgagctggtgataatttatccaaatttaacgaaaatttttgaattagatttttttcgtattctaaataaagatttaaagttatttctttacttttttgaatattttttttagtttgttttaattcaattaattcagaagattttctaattctttgtttttcagctttaatttgaagcaataatgtctttttttgttgtttaaaatcagtttttatttttttaagattgaaagaaaaataattttgaagatcttgagtatttgtgattgattcaaaatttattatttctttttttgcttcttttctctttatatttattaattttaaaccagttaaaaattcgcgaaatgaaaattcaagtctattcaaaaatgaagaaaaaggaaacttattttgaattttagtttttaagaaattagtgtatttttgttgtttaatttctgctaattttttaatggttttttcatttaattttttaatttctgcttctttataaagttcgattaattgtcttttattattaagctcaaataaaagtttataaagattagattttgagttgttataatgtttttcaacttttttgtaaacatcaaaatgattcaaaattagcttattgtattcttgaatttcttcactagtgcaaccattagcttttaaaacaacaatattggcttgatgtcttgcatataaagatttttctcttgttttttgttttcaagcactatcatttgttagtggaaaagcaatattgtcataaacatttaaatgaggataaagtgcataattttgaaaaactagacctaattttctatcttgtggagtacttttagtaacatctagaccttcaaaaaatatttctcctgaggttggtgtaataagtcctgctattgcatttaaaattgtggttttccccgatccagatggtcctaataatgttaataaaatcccttttttgatttttaaattaattttgtcaactgctaaagtttcaccaaaatctattgttaattcctttatttctatagctcaattatcttcttgagtcttaaatcacttgtctgttttttcttttgtttctttaataaaattaattttttcttggttaacttgcataataaacttctctctaaaactaagaaattaaggttgagtctttgctcagttataataatctattatattttcattttcagtttctggtgtttttaaaaaatttaaaagattacctgttcctcttgtcacaaatacagttgacatcatatttaaaatagattttgtagatacatctgaatttaataatttataaaatccaaactttttgttaattgcgttttctatgacagcagattgtgctaaacctcaataatattctgtggcttgttctgaaattacacttttgtaatctcctgttgtaactgaaaaacctgcttgatttgcttcaactgaataatttctgtatatgccatcatgtcctattaaaattgttccaacatatctttcatatgattttttaacttcaccagaaaataggaaagtaacttttgagccaacaggaattaatttttgtgcaaagtttgtagcatctgtagcaaatttatgctctaaaccttgagtttcaacatattgatttccttcttttttacctttttcaggagtatcaacgtctttaattctaacattaatttgtttatctcagcctgtttggtttaaagctattgttggtgtatcaccatcgtttcattttactattgttgcagccaaagctgtaaaacctttttcttttgaaggaagtgaatatgctaatccatcgtatctttttttatcttcttgtgttcatacatatgagtgatttaaaaatttggatatttctttaaaatattgactttgtggattttcaatatcttctagaggagatttttcaaaagtatctaatctaaaaccaattttaggtgttgaagcatttgattgagaatcaatgtgttcaatggtttgttgagcaaaatttaaattatcaccacaagagactaaaacaatagtgggtaaaaaagagattataggaagaaaaaagaaggattttttatatttaaaatttgttttcattattaactattttttaaataatggacccaaattttgttttagtagctctaaaaattgatcaaaagtaactgttttatttgatgaacttgaatttttattaaccactgcattaaaggtagttactaatgattctctaaatggacttgattttgcatcaacagcatcttcttgaattataaaattgtttggatcatcttttgcttttttaagaacatcaaatgcagttttagcacctctagttaattttggatttgtttctgaaagtgatgaatttgttaaattaatgtaattagttgaaactttgaaaaattcatatggagttaattgtttatgattagcatctcaatcttctttagatgttaataatcaatttacaaactcaacagttgctttatcttctttatctgaagcatgaataccaattaaattaggaccttgtaaaggaacaacaaattttttatttttagaagaaaatttttttggagattctaaagaaattaattcatcctcatttaattggcttgaagaagttttttcaattaatttattggaagctttatttataaagaaaagactaaaagagtttcttccagctatttgatttcctgcttttaaaatcacatcattaccaatattatttgaagttacaaaatcagcaaaagatttatctgaactaattcaataagatttgtctgtttctaaaagttctttaattttggtccctgcttcgtcatctacttttaaagaattttttacaggtttagttggtaaatcagaatttaagtaaattggtaaaacatttctttttgttaaatcttttacataagctattgctttttcttgaggtcgagtagatgtttttaataattcataagtatatcttgtatctacatttttaactatttttttatctttgttatctattgtttttaaagttgtttctagttggaaaactttgttgttttttgctgaaccatcttcaacaaagctatgtgaataacctgcagttgaaccagtgaaaaaaagtagttggtgattttttaaaaagtctgaagaatattgacctttttctgtaattaaaattgtttcatcttctattcctggatatagtaaatctcaaatttgtttgaaatttttgtaactattggaatttttatctctatattttgtaaagtttgcttttttatcagttactgatacaacttcattttctttgttaccttcacttattgaagaagataaaacaaatactgtgtttgcaatcgaatcaattcccataacatttgcagcactatttaaaggattattttcttcttttgcttgagggaatgattttttaactcttcttgctaaatcaattaaatctgtgtaatttgaaaaagctgctttagaaaattcgtaacctcccaatccaccttcttctttactaaaatgtttatattcttttcaatttttcttaatttgagcaatatcgtctgcttttttctcatcttttgccatatcttgatattttttaaagaattcagcatcttctgatttgatagttgcaggagttggacttgctttagtagcttcattaataataaaacctaaaagaattccatcaatacttagtaattcagaagatttacccattggaatagagtaaattccgtttgttgttattcctggaatataagtattgttttttaaaaaaatatctgatatattttgttttaaaaaattgttaattttattttgatcttctgtgtttttggaactattatctctatctaaaacgaatggtagtgtcatattgtaagaattaatagttgctaaaacagagtcataattaaaaattaaatttactaaagatgtttgatctttggcttttagtttttgtgagatagtttgagctgctccgccgtaaccattttgaaattctgcttgagtagctttgagataatttggaaaacttgcttttctagttgcatcagtgtcaaatgaatttcatttggaaataatttgattaattgcttttgcttctcttcctgcagaagaaaaagaataacccaatttaattaaattatcatctttttgatcaaatctagtatcaccacaagatattaaagctaaaactggtgaaagagctaatgttgctaatataatttttttagttttgttaataaaagatttcttcatactttcctcattttttaaataaaaaaactcagtaaaagcttttttgaaaacaaaataaaggcttttattgagttttgtacttatcatacgtttattatatattatttttcaaaaatgaaactttttttgattaagaaattgatactgctaaaaaattatttaatttttttaggagaaaataagtctttaagattttttacaaaagtctcgtaattatgtggtgtatttggtgaagattttatttggtttgaataactaataaatgcttttgtaatatttgttcttaattctcctgataaactaccagctggttcagaaaatacaacattttcttctggatggagtttaacattttggaaagtattaaagagtaatttaaataatctattttgtgggaattttgatgaatcatctggattactacttaaattatcattagttggtgctaaataatttcctctaaatccaagatattcatttgctgttccttggaaagttttttctggttcaccttctttttctttatatttaaagctttgtttttcactaataaatcattttaagaaattagcagttgctaaatcttcttctttatttgcatgaattccaatcaaaccaggaccttggaaagtaactaatttttttgtactatttctatcttttttatttggttcaattaggaaatgaatttcatcttcgtttaaagatttatcagcatctaattttttataaaccactgttttatctatattaattcattccaaagttgtagcacttgaatcaagtaaatttaagttattaaatgctttaaattcggttggaatttcttttttaaaactctcaggtttgttgaagaaataagcttttcattgagtattttttgcttcattttctgaagcatttggtttatttaaagaattaattaaatttaaaaattctgtatttgaatcaagttctctaacttgagctgaagtaggatttgcatctcaagtttcaactgataatttgttatttgattgtttaacagcatagcttttgaatttaagcatataatttgtttgagtattgttgctgttgtatgttcatcaacttcctgttggaacactggatttgttatttattgaagtaaatttaaacaatattccatgctcagcttcttctttagtaggtgaaaatgcagcataaacaggtgttgaacttacatctaatgaatttttaattcttgtttttaataattctttttgggtgacaggatcttttagaaattctaaaatgtcaattctgtctagtggagttgcaaatctgtttttgtaatttgaagttgttgttattgcaaatagcatatgatgatcatttaaataagtattagaagcaggatttccttggactaatccataaaaatagatagcatcttcttttaataatttatctatttgattaaaagttttaagagcagtttggtatcttggtgatgttttatcgtctaaaaatgttgcatattttataactgtatctgaatcattttttgcatttagatttttttctaaactaaataaaaatttactaaaatcagcatctgcatttgcaaaagctatagaataaagtgaatttcctatatcatcaactccaataatgaattttttgtctttatttttgtttttagattcttcaaaattgttaggaaatgattttctaattctagaaattaaatcaaaaaaatcttgataattttctaaactacttttagaaaattcataaccttctaaaccaccttgttcaagtggaattggaacataatcacctcatacttttttaatatattcggtgtcagttttttctttatctaaattttcaaatcaaattttatcttcttgttttattgttgcttttttagtaccttgtgttgtagcttgttgaactacataattcaaaacaggtccattaactagtaatgttcttgaagattttaaactaggaattattcaatattcctttggatttaatcctgcaatttctttgctttcttgaagaaattcaggtggaaaagttgtttttattgcattttgcaaacttggaaaatctgaatattttaaactcatatcatattgggatgcaacagcagctaaagtaggataaccaaaaattaaattaactaattggttagcgttttttgcttttaattttaactctaaagcattaccttgttctgcataagtttgcgcaaattgtcgattgagtgttattggataaaatccttcttctttgtttttaactttttcactttcatttcaaagcttaacaatttgatctaatgctaaaaaccttccttctctactattaaaagtgtgagcaatcactaatttatggtcatttacttgatcaaatcttgtttggcaagaagcaaaaaatgctactggcaacacaagtgcagtagcacctaaaaagcttcttaatttgctttttaagttcataattcctccatttttttaaatatttttttaaaccaaaaaaaattttatcaaattactttgtctttttatatttttttactataaattttcctttatcttttgaagaaatttcttcaaatttttctcattttagttcatttaaaaaaatatcaccagagtgttctcccttgataaaggaaattattaattgatcacactcatttataatgcttttgtacaaagtatatcctcctgaaacaaacaaatgtttactaggatgattttgatattctttaattagattagaaaaattatttattgttttcacattttcattttcgtaattaaaatttttatcatcactaacaatgtaaattttgcttcatttttgaagtgattttggtaaagtaaagaaagtattttttcctactaaaatatcgtgatgttttgtttgttctctataaaaatcaaagtcttcttttacataccaaggtaaatcatcgccttttcctattaaattatttttgcccatggctaaaattgaaattatcatgttttttcctttaaagtcaaaattatattttataaagtaaatcttctaaaaaattattaaaaatatgaagaaatttaaattaatcttaaggctttttgtttatttttagtaaaataatatgactatgaaaagacaagtaaaatacttattaagtacattagtaattacaactccaataataactctcatttcctgtggttcaacagcaagtttttcttctcaatttttaagtggagatcaagctaatatagacaaatatgtaaaaattaatccaactattgaaataaatggacctaacaacacaaaaactaattatttttcttttactttagatttatcctctactaatttaacagaaattcctgaaaatgctttttatagtgctgaatcaagaacatacactaaagcaggaacaggagatcaaaaaaatatttctgttgtttattatttatccaaaattattttccctgcaagcttaaaaactatagaaaaaagagcttttttcttagatccagcgatttataatgaacaacaaagaaaacttgaacttgatttttcaaaagctactgcactgactacaattaaaaaacaagcatttaaaaataatcaaatttcttctttagtcttaccaaatagcctacaatctatagaagatgaagcttttgcaagttcaaatattcaaaaaatctcttttgcaattccacaatccaatgtggaattatcaaaaataggagttggtgcattttttaataatcaattaactaatttagatttagaaaaagcaaaaaatttaacttctattgcaaaagcagcttttaaaaagaacaaaatttcttcaattaaactacctacagaattcataaaccaattaactataaatgaagaagctttttcagaaaatccaatcaaaaaagaagatgttgtgataacagacaaagacaaagtaatttttgacgcaagtgcttttaaataatttttaaaaatttgtatataacactgattttatcagtgttatttttttattttttttaaaacacctaaaaaagaaaatgaacaaaaacaaagcaaaaacaagcaaataatgaagttatacaaagtaaataattaataatcaaaggtaagcttgctagattttagttttgtactccactaggatcttttgcataaaaaggatgaattgataatatattagtttcttgtttgaaaatgtttgtaattagttcaaaattattacaaattcattcataatctatttgattcacttctttgttatcttttaaaacttgtgagacttgagatagtaattgtccttgtttagcttttgcactaaaaaagtgtaaacctgaagaattaatgtaataatttgcttcttttttctttgtaaatgacaaaagagcaaatgtgtttgtggttcaaatatttgcttttgttagttgagaaatagtccttacataaactaaagaaattctacaacccgtgaaatatccagggcctaaatttaagtaaaaatctttaatatctttaatatttagcttgtgtttttgtagtatttgctctacttcatcagctaataattctactttttttgaaacttttataatttgtttatcaacaaaaccaaaatctgagttaaataaaataagagcaaaaaaatcagatgtagtgtcaagaaatattttcatatttatcaataaagattgaactctctttcttcattttcaaggatttttatgtaaattactaatgaatttgaatatagaaattttagtttattagctcattcgataacgacgtatttatcttcaaaataatcttcaaattcagataaatcagaattgtaattatcaagatcaatatgaactagtttatcatatgaaaacataaaattaaatgaaggagaagtaacttcttgttcaatattcaaagttttagctaattcttttacaaaagcagttttaccagctccaaattcaccaattaagtaaataaattttgcctcaagtgcaaacactttattcactactagtcttaaatctggtatttttttaactaaaattttatcctgattttttaaattttttatcaaatgattaaatagcatattaaaccttatctttgcttcttttttcaagctttttattattttactatgttattatttgaaataaaaataaaattaaaactaggaaaatttcctagttttaattattatcttatatttgattaacgatttttattaatttgtggtttaaagaatgaatatggatctctaatgtcatatttggatttatgttcaaaattagagtttgttccggctggaattttgtgaccaacaataatgttttctttaagaccttctaatctatcaacttgagaagaaattactgaatgaactaaaatttttgaagtttcttgatatgatgcagcagctaagaatgagttagaaagtaaaggaatttgttttgctcctttaatgataatgtttccaaaaggaggtctttttccttctgctattagttttccacttacttcttggtaatcaaaaatatctacaattgaaccgatgaagaaatctgaatctccattgtcaataatttgaatttttgaaagcatttgtctaataataatttcaatatatttatctgaaattttaataccttgcatacgataaattctttgaatttcttttaaaagatagttttgtaatgttctagcatcagcgtaatttaataattcttttagaataattggaccttcaacaagtttttgacctggaacaactttatcaccgatttgtactcttaatttttgatttgaagcaactctaattattttgtatgcatctaaattttcttcatttttgtactcaattgtaattaaagtagaacctgtaagttgtccatcttctttgtttttaactgattcaattttagcaacaactccgtgcactggagaaatttgtgcaggacgacctcatggatgttcgtgtgcatcgattagttcaattaaacgagtaaatccacctgtaatatcttcaacaccagcaacccctccggtatggaaagtacgcattgttaactgtgtaccaggctcaccgattgattgtgcagcaataattccaactgcttcaccaatagctactaatctgtttgttgctaaatctttaccataacattttttacatacaccatttttagtatgacaagataaaatggaacggatttcgactgctgttactccagaatcaactatttttttagctaaatgggcattaataaaatcacctgtttgtgctagtacttcaccatccggacttactacatctttgtttaaaaatctaccttcaattctttctgctaaaggaacaattgttgtgtttgttttagtatcaataatttgttttactacaaatccaaagtcagaaaaacaatcattttgagtaacaacaatgttttgtgctacatcaactaaacgacgagttaaataacctgatttagctgtgttaagcgctgtatcggtaagtccttttcgagcaccgtgtgttgaagaatagaactcaaatgatgtaagaccttctaagaatgaagatttaactggcacttcaacaattgaacgaacaactctttcattttcagcatctacctttagagctttaacgttatttgccatcaatccacgcattccagctaattgaacgaagttagacatatttgatctagctcctgatttcatcataataactagtgaattttttggatcaagttcaactgtttcgtttagatttttttggatttcattttttacagccgttcatttgttaattgaaagaatatatctttcatcatcagtgattcaaccttgtgcgtagaagtggtttaattgattgatatagtcttcaccttcttttagatattcttgtttttttggtgctattttaatatcagaaatagacatagaaacaccagaatttgtagagtacacaaatccaagatctttaatatcatctaaaatagctgcaactacatttacataattaaatcacactttttcaagaatttctactttgtcttttacttcaaaaactctaattttattaactgaatggatgttgttaattcttgttagaagttcaaattcagctgttgtaaattcagctagtttcattgcatgagtaatagaaagtggttcacctttgaaatccagtagttttttgtacaaaagtaaagaatcgtgataattttcaaaatctaatttattaattacactagctacatcttcttttgaaactacgtaatcataagtatcaaaaatttgacgtactattttagcaatatcttttttagttagtgcagcatttaaaggaagttgttggatgtattgtggaatatttgttcccattggcactaaatattttgctaactggttatcataatttagttctaaatcatcaactttattatcaaagataaaagggaaattatcaggaaaaattctatttaaaataaactttccaactgttgaaatgatgtatttattttcttgtaaagcatttgattttttgattttaatctctgaaaaaggaagtgctattctagcgtgcaaatcaagcacttttacttcatatgccttcatcatttcgttataagaaccaaaataacgaccttgacctttagcatcatctttttcttgtgaaagatagtaaagacccaaaatcatatcttgtgaagggttaacaattggttcaccatcttttggtcctaaaatgtttttatttgcaaacattaactctttagtttctctaatagcttcaggcgaaataggaacgtgcacagccatttggtcaccatcgaagtcagcgttgaatcctgttgttacaagtggatgtaattgaatagctttaccacgaactaaaacaggttcaaaagctctaattgaaagacggtgtaaagttggtgccctgtttagtaaaattggtttatttttaattacctctgcaacatgtggtcaaatttgtggattttcttcttcaatcatttttcttgctgttttaatagaaggagcactattttgttcaattagtcttctaataattcaaggttcgaataatttagccaccattttccgcggtaaacctgcttggtgcattttaagttttggacctacaacaataacagatctacctgaataatcaacacgttttccaagtaaattttgtctaaaacgaccttttttacctgttaatgcatcagaaatggatttaagtggacgattatcttttgtagtaactggatttggtgattttctttgattatcaattaaagcatcgatagcttcttgaatcattcttagttcattttgaataattaaaatgggagcatctgtttcatatcatctttttaaacggttgtttctaatgataatacgacgataaagttcgttaacatctgaagtagaatgacgagcaccatctaattgcactaatggacgtaaatcagctggaataacaggaagatttttaataatcattgatttgggatcttgacctgaatttaaaaaagcattaataacttgtaatcttttataaagtttgtctcttttttggtttttagttgaatcttttttagaaagactagtactgttttgcacttcttgaatttcttgttcaactttttctttttcagcttttaaatctaaatgttctaaaagatactcaattgccttagttcctgtagaaattcgagcatctgagtactcttcgataatttcgtttagttcataaaaatctattccgtaatctctaccgattttagaagtagctacttcagtaagatctgttaaagctgcggaaatgtcttgatattcttctgaatcttcttcaaatttttctaagatttcttgtagtgcatttttgtaaattacaccagcttctgaaatgtcaataattttatttttagctaaagattttaaaccacctgtttctaaaactatgtgggatttgtagtaaattaaagactctaatgaagctttggaaacggattttccagtttcttcatttcttaaacctagtaatttcgaaataattgagtgatcaattttgaaaaatcaaaagtgtaaaacaggagaatttaaagcaatgtgacccattgaataacgacgagcaattttgggtaaaatttttgattttaactcttcacattctttagttgctaaacaaattgtgttttcattagattttttgtacttttttccacaaacaggacatttgtaatcgattagtggaccaaaaattaattcatcaaaaagcccaccacgttctggtttgaaggttttgtaattaattgtttctggtttagttacttctcctcttgatcattctaaaatgttttcaggagtagccagagctaaagaaattttttcaattgtattctcgtaaattttggcatattgacgagaaacttttgtatcagttttattatttgtactcatttagtgttcttccttttgtttatttaaaatgatcaaattcatcttcaaaatcatcatcagcgtaatcttcctgataatcttctactttagacatttggctttcaaaatattcttgatcaaaagcatcttcaagcaacatttcttcaggatttgaagcattttcagcgtttgcttctggatcttcttcttgattttcctttttgtgaacttctagtttaatacctaatccccttagttcatatgctaaaacgttaaaggattctggagttcctggttttggtatttttcctcctgaaactaggttgttgtataaagcatttctaccttgaatattatctgatttgtaagttaaaagttcaagtaaaacagatgaagcaccaaaggattcaagagctcaggtttccatttctccaaatctttgtccaccgttttgactttttcctccaagtggttgttgagttgttagtgaatatggaccaacagaacgtgcatgcattttatcatctaccatgtgttgtagttttaacatatacatatagccgattgaaacatcattgtcaaaaggttgacctgtgattccatcgtataaagtaaatttacctgattctggaatacctgcttgattaaacaattctttcattttatctaatttaactccgtcaaacactgggcaaacaaatttaatatctaattttttagcaaccataccaaggtgcatttctagaatttgtccgatgttcatacgtgaaggaataccttgtggatttaaaagaatatcaattggtgttccatcttctaaaaatggcatatcttcaactggtaaaactaaggaaataactcctttgtttccgtgtcttccggccattttatccccaactttaatttttcttttttgagcgataaagactttgatgattttttcaacaccgtcttctaaattatcttcacgagttcttgaaagaatttgcacatcaataactgtaccaccatcaccgtgtttaacttttaatgaagtatccttctgagatgaggcttttttacctcaaattgcgttcattaatttttcttcaggtgttggattatcttctccttttggtgaagttctacctactaaaatatcacctgcactaacttctgatccaatacggacaattccgttttcatctaagtgtcttttacttctttgtgaagcatttggaatttctctagtaagatcatcattacctgcttttgaagatctaaattgaatagtttgttcttgaatatgaattgaagtaaaaacatcatctttaactagtttttcactaataataatcgcatcttcgtaattgtatccatatcaagtggaaaaagctactaaaacgtttttacccaaagccaattcaccttgatctgtagaaggaccatcacaaattaaatcaccttgcttaacaaattgaccaacttcaactattggacgttgtaaaatcaaagtttcttggtttgatctttcaaaataacgtaggtgataagttttaatatttccttgttcgtttttgatttgaattgatttagaatcaacaaaaactacttctccatcttcgctagctctaatgttagttgatgagaatttagctacatctgcttcaattcctgtagcaacataaggagcttctgtagtaattaatggaacagcttgacgttgcatatttgaacccattagcgcacggttagcatcgttgttttctaaaaatggaacagcactagctgaaagtgaagtcatttgtttggaactaactgctataaaatcaacttgttctggtttaactgttaaataagtatagtttttacgaacaataatttctggttcaataattttgttattttcatccactaataaagaagattgagcaaaagtatatccaaattcttctgctgctgttaatcaaacaatattttgtggatcgtaatttacaacaccattttctactgggaaataaggagtttgaataaatccatatggattagtttttgcataaactgcaaagtttaaaataagtccaatattttgtccctcaggtgtttcaactggacaaattcttccatagtgagtaacatggacgtcacgaacttcgaattgtgcagtttctctattaagacctccaggtcctaaagaggttactcttcttttgtttgccatttcacctaaaggatttatttgatccataaattgtgaaagttttgaagaattaaagaagtttttgaattgattataaataggtttattatttgtgatgtttttaatgttaattttttcgctatctcctctagaagaaattctttcttttgtgtttttttctagcttggataaagcaattaaaaattgattttgtaataactcacctacattaacaacacgtttgtttactaatgaatctggatcgtcatttttacctaaattagcaagtaaattgaagtaatatgaaacaatagctactatgtctgaaattaataaatgcatttcagttgatgttggatcatttccaataactagaactgatttttcttgttgttccttgttagcatcttgttccatagcacgtttgtttggtcaaactcttaaggtaataatttttgttctggtgtttaaattttcatttttagtaatttctaattgacgaccataaacattttcatctataccttcgatttctgataaaggcagaattgaattttcaaatttagattgaatatcatttgcaattttaggagtaataaaagttcctaaaggatacaataattttcctttagaatcaaaaatatcttcagctaaataggtttgaattattctatctaataaattcaattttctatttaacatatatctaccagttttagataagttataacgacgttcattgaataataaagcgggaataaagtttttcaatccttctgttgttattctgtcatcttttctaattgttctgtaaatagattctaagctatctaattgttcttgtactttatcttttcttaaaaatttgtcttttttcaatgattctctaagttctggagaatcaccaaaatattttttaattatatctttatcaacaaaaccaattgcttttaaaaaagtaattaaaggtatgtttttatgtttatctattcttaatttaactgtatctgttgcatttcttgtaactctatggaaaatttcaagtcatgaacctagttgaggaataatttcaactttattaaataagtcatcagcttgtctgtttctaacattttctctaaagcatactccaggtgatctaattaattgtgaaactataactttttcaaatccattaatgataaaagttccaccttcagtcatataaggtatttcaccaaataaaatttcttgtttttctagttcaccggattcaacttgaagtttttctagtgttgcaaaaaccttgcaaacaaaagactttccttttctttttagttctttaatattagtgtagtcttgatctggatcttcaactcttacagaaccttttttaaatctaatttctatttttccattagtagaaataataggatatattttattaaaggtttcttcaattccttcttttaaaaatcatttaaaagattgtttttgtgaatctaaaaaatctggagtaggtagactaaatttggttttagaataatctctacgtagtgttgtaggtccatattttgataatttaaattccatttaattactccttgtctacttttttgctttctaattgaatagtaaaaatggcacacaaaacaatgccattttaaaatttgatttttttgttaaaaattattcaacaacaacttctgctccaactgaagaaagtttttctttaatatctttagcttcgtcttcttttgcattttctttaagaactgctggtaagttgtcaactaattttttagcttccattaatcctaatcctaataattctttaacaactttaataacgttaactttttgaccaccatcagtttttaatgtaactttgaattcagattttgctgaagcttctccacctgctgctggagccgctgcaactgcaactgctgaaggatcaataccaaattcttctttcattgcttcaacaagttccataacttctttgatgttcatttcttttaatgattctataaattgttctttagtaagttttgccattttaaattcctttattttttgttttaaatattttttatgaatttttaagattctaaattgatcaattatgcattaattttattttcatctactagcatttttaatccaactgaaagttgtcttaaaccaccaagtagagatgatgccagcattgtaagtgcttcttcgtagtttggtaaagttgcaactgtttgcatttcttgtgcatctgcaacttttccttcaaaaataccgccttttaatacaactactggatttgttttagcgaattttgaaataattttagctggagctattgcatctgtagaaccaaaagcaaaaaaatttggaccaactagtgattgttctaaatctccgaaacctgcttctttagatgctattttaaatagtctatttttataaacttttacaaaaacacctgcttctttaagctcatttctaagagtttcaacttcagcaactgttaatccacgatattcagctataactaatgaagaagaagaattaatcaaatctttaatttcttgcactaattcttcttttttctttctaaaagcgttcaaattacacctccttattagtatagaaaagatgcaatactcaaaaatatacattcaataacaaatattaagttttttaaaaactgttattatctctacgtattgcgaagagaattatactaaaaaatcaaaaaatatcaactattttatagacataagtaagaagtattcaaaagcatctttttcattcacttgatttgacttaatttttctatctattttggctaataatttaattaattcttgaagttttgttattcctatttttttataaaactgcactgcttttttaacttgaaaaatatgaatttgaagttctttttgtatgtcaaattcattatatttttcttctttataaagaaaacaaataaaagctaacattagttttgaactaagttgtgaaattaaaaattgaatttttttaccttgatttattttttctttataaaaattccatgtgctggcaacatcgtgatctgtgaaagcatttatgaaatttcaatcactatcagaatcatattttgttaataaattttctatactttcttcagtgatgtttttatcatataacaaaagtttatttagttctttttcaataatacttccatttaaaggaagttttaaagataatgtaagaagttgggattcatcaattgttccttgattttcttctataaatttacttataaattttatgattgttttatcacttaatgtttctgttttaaaaacactagaacttttaaaaaaatgtgaataaaaaaagcttgaaaaaatctttttttcttgattttcttcttctaattcgtataaaaaaatcactggactagaactatctattaatttttttgcaatctttttttcttctgagttagttagttttgtatctaaaaagttatggaaaatgaacaatttattagaaccaaaaagatccctagttgttattgtattcataatatcaaaaaaagaatctgttgaaagaacatcaacaacttcaaaatctatgaatttagcaagaatttgttcaacttttttcttcgtgaaatatgagtcagttccatagacaaaaaacatattgaaaaaattatatagcaaataaagatagttgtaaaatttaattttattagctgaatataaatttgaaaattagctattttttctataattcaaagtaaatgttgagcaataaaatccaacaaatttttttctcaaataaataatcaaccgataacatagataaaaatagcaaagggaagaaaaattaacgaatttagataactaaaaatattatatttttcattaaaaaataacaataatattgaagcaaaaatatgcacaataacagttgaaataaagttttttattaatttgttctctattttcaaatataaacaataaagcagaacaagtgtaattaaaaaagtaaaaatataactaaatgagtaaattactaaaggatttcacaaaataaaaattatcgcaacaaaagataaaatttcaaaattcttaaatttattttttaaaaacactttgttaactaaagacaacacaaaaaacaatgtagctcttaaaaaagaaattggaaaatttaaaatgtaatttattaaagataataaaataacaaaaattatgtttgagaataaattattaatttttaaaaatttaagaattttaaaaataaataatcttaaaaatcctaaatgaaagccagaaataacaaaaatatggtaaatatttaattgttttaaatttgctataaaatcattatctaaaataaaattttcgcctaataaagcaacagggaaaatttttgaataattaaaatttcctgaagataaaaatttaaaaatgttgttccgccaactttcatctctagtaattattttaaaagaatttagagtttttatttcaaaaaaagtgtgaaaattttttaaataattttctatattaaaatttgttgatttattagtaatttttgttactgttccacttataaaaattttgtcataaatatttaaatttttatcttttaaaaagatattataaccattgaatttaaaaataactcccaatgcattcttattagaaatagaaacttctgagtgaatagaaaaagatttaattgaagttttatttattcaaaatcaagaaaaaagaagaaaagagaagcacaaagtaaataaaatttcattataaccttttaacaaaaacaacatcactagggttaaaaaactaaagaaaaaatactctattgaatgctgatcaaatgctaaagtaagaaaaattaaatttaatactacgattattcaagagaaaaattgttttgtagtttttctaagctctttgatcccaatccagggatttgttcaatatcttctcaagttattttcctatgtttatttttcaagaaaaaatcttgtatttttgctaataaacttttattaattttaatttttttgaagacttcttcttttaaattattagatagcaaaggtttttgttttttaatttctaaatttaaatcttcaaattgtttttcttgtaatttgaaaactgataaatctgaattaggaagtggtttgaatttttctataatttcctttaaaagtgttccttttttaaaagttttttctccaggaaacacaacttgacctgaaatttttaccttaatatcttctttataattggatattggtgaaatattataaaaattttctctactaatgtacaaaacagataaagtaaaaaataaaattgaaaaaagtacaattaaaattatttttatttttttagtcattttaagtctcctttcattttttaatttataattttatatacatcggtcaattgctgcttttttaaagtagaggaaagtccgcgctagcactatctgagatgatagtagtgttcatgttggatctaataaatccaagcctagacgacaagtgccacagagacgaatttattaaattaaagtgaaacgcggtaaactccatgagctagaaacccaaatgaaggtaggggaatttgttttttagaattcaataaaaaacaaaaagttttttaaacttagataaataattgacgctagaaatagtacagaacgcggcttatagatgtaaaggcaccttcgggtgtttttttttttttttttttacactttatttatcttcaaaaattaaagatttttaaaaaaaggaaaaatttaataaatgttcttttatttttcctaaattctttttataattcataattaatagtaataaatcaaaaaggggacaaaattgaagaaaaaatttttattaactttttctacttttactacaattgcagcagcaattcctttaattgttagttgtactcaaattcacactcaaacatctgcagaaattagagataaatattttgctacagttcaaacatattctgataaactcaaagaatttcaaataaaaattaaaaatattagatatgaaaaaccaaaaagtgatacagatcaaataactaatattatttatcaagcacaatctgtacttgatcctttaattagtgaagctaactttttattttctagactacatgaattagaaaaaaaggaaaattcaagactaagaacagtcaaaattttccatacaaatgatgagcatggaagattgttatttgacgatggaaaatacaataattactctggaatggataaaactggtttatatcttaaaaaatttaatagagatttacttttatcagctggggatttaatccaaggtctacctctttctgatactgatcaaggagaaacaatttctaaaattgcaaaatattctggttatgattctatagctgtaggaaatcatgaatttgactatggaatccaacatattctggatttagacaaaaatactacaaaagctgaatttaatagaactatgccatttatttcagctaatatttattgaagacaaccttcagaagctgaactagataaattatcagatgaagaaaaggcaaaacgccctccgaaatttgaactcaacaaaagagtttttaaaccttatattatcaaaacattatctaatggattaaaagttgcaatttttggaatcacaacaccggacacaaaaattacttcacatccaaaaaattctttctgggttgaatttagagatccagttgaagaggctaaaaaagtaatagccgaaatcaagaaagaagatccttcaatttctttcataattgcaacaactcacttaggaactggaagaagtaaacaagaatgaacttctgaatgagtagctcaaaatactaacggaggtttagatttaattttagatggacactcacacacttatgtagaaattcacaaaccagatgaaaacaaaaatgtttgagtaactcaaactgaagcttatacaaaatgactaggagatattgatttagtttttgattctctaactggcgaaattgtcaaaattgttcaatctttaagagatattaatcaaattaacattgttactaaagatttaccaagttattgaatttctgaattagaaaaaaaatataatgatgaaaacaaagtagttgtctttaattctccaggtgtattcaaacacgttgaaacaattgatatagacaaacaaccatactgaataggtagagtaaaagcaacttcacttggagttatgacagctaattcaatggcttgagattttgctaaaacaaaaatttgagaatcaaaatcaggatgagaaccagccactcttgataattcattagcgcttgtaaatagtggtggtttaagaacggatttaaacccaggagaaatcacaaaaggtgatgttttaggagttagtccgtttggaaacagaattgtgagcattagattaaaaggtgatgttcttaaacaagcattagcttatggattatccagaggaagaagtggtggttttgctcaactttcttctaatgttgcttatgatgtaaaagttgaaaaaggattagataacaaaactaaaacacaacaatgattatgaaaacctaatcccaattctttcaaaatcaacaacaaagctatagatgataacaaattctattacctaactacaaatgactttgtttcagtaggtggtgatggctatacaatgttaaatttaaatgaaaataatcaaattgaaagagcttatgagggaggaaaatatattgagtctctaataaaatatgctcaatatgtaaactctattggtcatgattcctcacctacagacttattcgcacataaactagctgaatatcttaaacctaatttcttagataatcaaaaagttgaaatacctcaagaagctttggtaaaaagaggtccaacagtttaatttccttcaaaatcaagtaaaaaaacacacttttatgagatggtgcccttttcttaataaaatttttaaacagtttaattaattataatttggaatgaatgtttccctaaatttaatgggagacattcattttattttgtctttaattcgtttgtgattgtaataataaatataatttgcaattgctttgtgaagttgtttaaaagttaaaaattctttttcgcgaccataaaaacattttctttttaatgtcccaaaaaatgattcaatgatgctattatctaaacaatttccttttcgagacatggactgagttattcctttttgttttaatttttctgaaaattgtttatgttgatgttgtcaaccttgatcactgtgaaaaattaaaccctcaagatttttgtgctttgaaaatgctctttgaagcatttttctaatttgctggttattagcgcttgtagacaaatctcaagcaataacttcgccattaaacatatctaaaattggcgataaatatgcttttccaaatggtccgctaaattcagttacatctgtagttcatttttgatttggttgagtagcaacaaaatttctatttaaaatattgtctgcaattttgccaactgttcctttgtaagatttgtattttcttctagaacaaattgctttgagattgaatttttccattaatctgcgaacttttttaaatccaattttatattctctattattaagttcagcttttattcttctttttccatatcttgctttattttcttcaaaaataagcttcatttggcttataatttcttcatttttcttgtcaaaatcttcttttttgagttcataataaaaagtagatataggaatagaaaactcttttaatacttgagttaatcgcaggtttttatcagcttttactttattataaattttttttattttttcttgccttggttgatttgagtcaaagatctctaccaaggcttttcacttttttagaacttcattttccttttttaaaagtttattttcttctctaagaagtttaagttcttcatatacagataatgaagaatttgattgattttgactatcggaattgtttgatacttttgtagatttattattattattattaatcttagatttcattattggtcttcctttgtttaattctaaaccactaattcccgattctaaatattttttcgctcaaaaagatatttgacttggattaagattattttcaagtgaaattttaacaattggttcaccagctaaaaatcttttaactatgtttaatctttgatctatagttcactttttatttcgtggttttttcttaagaccttcaacacctaatttgtcataaattttttctcaaaaatatacttgatttaaaaaatttttttgacttgtattagcaaaatcaggctttttaatttcaattccttttttgtatttttttacacattctaatttaaattctaatgaatatttcataaaaaaaacccttttctatttttctaagaaaagggggatctgctcaaaactaattactttttttattattaatgtataaaaatatacgtataagttcgaggtattaattattattgattatttttttgattcttgttctactgcagctatatcttcgtctaattgtttattggcttttttagaattttcaaaatttaaatcgaagaattcattttttgcaacataatcagctttattagtatctgcaaattttaaggttacaaatgttccaaaattttcaatttattctttagtgtcatcgtagtttgtaagaataattattttggtaacatcttcagtgttaattttattgaaaatttcttctactttatctacttttttaaatgaagaatcttctggattatatcctaaggttttataaatgttattttcaaacgatttttgtaatattcttttgtaggaagtgttaattttgaattatctgtagttgaaatttctactctagttaataaaagttggtacaaattataggatttaacagttaaggttgctttttcattgcctacttgttctctaatagttttatttaattcttcaggattggtttgtaattggtttagttcttcggcatttgtattgtgtgctttataaacttcagcaatgattttactttgttcttctaaatcgtcttgtttttcaggagataattttgcgattttttcttcaatttctttttctgttgtttcatacaaactgtgtttttggttgtattcttcttgagttataaattttgtatctttgacaaaatcatctacactcattttttcatattgtttagcagaaggatatcctaaatagaattcatcacgaagttatttttgttttgcaacttcttgagctttgtcttctttggcttttttaacaattgctgcatctagtgttgcattattgtttcttatatcatcaaggtttgattcaaataaaatgtttttgtaaactatattatctaaagttataccttgatatttagtatgtggtttagctaagtagtgttctactggttctgcgaactctacttttacaaaacgtcctcaattgactgtaggtttttcagaagttagtttgttagttagtaaagtaatttttttaattttagctccaggaacttctaattgttttaaaatactttctattttaggatcacgggttaattcagttggtttatcttgtgcaatataacctagtaataaataaatgtatttttcaaatgtagtttttagttctggatttgttgatattccaaatggtgaattatcagctgtagaaatttctgtttttattaaagtcaatccatacatatgatatggtttgatatttatatttactttttgattttctagtatttgtctgataatttgattgaaatcgtttggattattttctatttgtgcaaattcaccggcatttgtgttgtgttttttaaatatttcgtttttaattttgttaatttctattggatctttttgcttgttttgagcaagtgttttaattttatcttcaatttctttgttaattaattgaatttctgctgcttttttatcatactgttcttgagttataaaattttcgtcagcttcgaaatcctttgttgtcatagctaaatattctttagcttttggaaattcttgataaaaattatcacgttgttctttttgttcttcaatggtttttgcagttgtttctgtttttgaattttgatcttttcctaataatttagcaagaattaattcatattcggaaccattttctttaagttttttaagtaagtttgcatttttttgagcaaaaattacataatctttaattgtttgtttaacttgtgcatctgtagataatttttcattgtatgtattagctaaacttagagctaattcagcatttatatgtgcacttagttgttttgtgtaatttactaattcttctggaagggttgaatttggttcaaatgcttttggaccagttgcttgttgagcacttatgttttcttctaaaaagttagtaataattttgttttttctgttgttttttgttcttctgaaagtttggtgtcatcatctatttttgagagttctttatctattttaagagactcagctaatgaaataatgtcatctttaaattcaattaattgttgttgatcagttggtaattttattttagagttttcttttgcttgtattgatcccaaagtttttaaaataacaggcgaatatagagaaattggagttttatactcaattttagtttctacttttgtttctgttttacggtttggaaggattaaagccatagcaattatagaaggggaagcaagtactaaaaatactgcaatacccaacgctaatttactcttttttatgcttttaaagttcatctattaacctcttttcttttactaataattatatatatgccaagtatttcgtacaaaaaacatcagaaacaaaggaaaatgaagaaaaaataagtattttttattattaattaatctgattaaataaaaaaaccactacaaaataaccgtggttttaaggcataattttttaatgtaatttttgatttttaaattaaatttttatataacaaagtttatattaaatactaaaaatattcaatttataatcattaataattaggtgtttttaaatatattagctaaaattaaataaattaaatattcaacaaatttattttcctttttgatttaaagcgctatatttataatatataatcataattttttaataaaaaatatttttttggaaaattaaatttaaagaaaaataaaggatttttataaaaaataatttaaagtctaatttaaagtctaatttaaagtctaatttaaagtctaattttgataatatataattataattttttatataaaaatttttttgatctttaatgtacaaactaatcgtattctatttatttgttttaatttttcattcacctgtttttttacttccttcacggaaaagcttctcggatttttgtaattgttgtaaatccaaatttaaagtagctctagaaatttttaattgttgagatatttcgctaattgtaatatttggattttgttttattaaatctaaaataattttttgtctttcaatcactttatctctaacattatgttttaaaccatttcgattaatattagttgattcgtaatttctgttatataaagttactttgaccatattggcattaacatcatacctaggttgcttatcaaaatttttataactatcgaagattaactcaacacctcttccttgttcttctacgaattgcaataaacgtaaaatttgagcaatacctttatttcttctattatttacaccgtttttaatttgttctagcgttaaattctctactaagccacctggtgaataaacttctactctatcatcaaaaaagctaattgttatatctgaatttataagactataatctctatgacaaaatgcgtttaatatcgcttctcttaatgcttgagttggataatctctaacttctaatctataagtttgatttggaaaagtagctttggttttgttgtaaatttctgtagtttttagtattgtatcaatttgttctaatattgaacctgataaatctgctttatctaaaaaaatttcttttgtaagtccttgataataagctaattttgtgacaatttgacattgatcactaaaatacaatgcaatgttgttatatttgttatcatcatttattaaagatagttttttaggattaaactttatatttaacttttctaaagcttttttaaagtaattaaaagttaaatctgtcctttcgatagattttttttcaaaataatatggctcagagttcaaaaacatccttcctatttgttctaaacttgcacgttgagtggtgctaccaattctaacaaaaaattcaggactagaattacttaaagaatagggtttttgcttaccttctctcactgtgattttaatagggattgtgctactatctcaatttataagatcgtagccatcattagaaagttgggattttcacatagacaatttatctattcacatttgttttgtcttatcatctattggttgaataatacaacgagtttcatcatcaacacctaaataaattattccaccatttgtattcaaaaaagctaaaatagttcttgctactttatcatttatttcttgtttgtattctacatttgtatcttcgatttgttgcattgttttacaaatattttcttgatttttcttcattttaactcctacagtatttggtatttttattttataataatttatttattttctttttctgtagttgttaagaaaatatcgtgaatacttacatagtctacattatgtttacttggaaagacaatttcaatttgttttataaaatcattaacatcgaaagtatatgtaaccattgacttatctttggatcaaataggttgttgttttatacttaatttagtttgttttccatctttattagttacattaactacaaatgggtcttttatgtatttatctaaacctgctttagctggtcagaaataactaggatcatttttaaatttaagtttgatttgtccaacaaaatttcttttttctgtttttggttttacgaaaaatttaatatcttttgaacctggtcaagcaaatcaataataaccatttaaaaagacatttccaggtttgtaatattgtaatcatcaactaccaatttgtgtagcatcagtagctcaatgtttagttaattctttatcatcaataattttgttcaagttttttcaatcgtgttcataaaatctagcatttgctaaatagttaatatgatattttatttttaattgtccactttgattattaacaatttggaaataaaaagaatctaaaagttttctgtatttttcatctaccaaattagtgatagtttcttgatttacaaaagaaggaagtaatttatctgaaagtttatttaattcttcttttactttattttcaattacttctaaagattcaatatctaaaactttattttgatttgaaagtaaaatttctttaggatttgaaaaattttcatctttggcaagtaataatttttcaattaagtatttacctttttgattaaaaatggtagaaatggtaatatctaatttattttgttctttattaaataaaaagctgttatttttttcagtttttaattgttgttcttgttgattttcttgatttttcaagactagtttaaacttatttttgtttaaatctaaatttgtatctaaactaatatttaatttacctgtttttgtatcaatattagaaatttgtttaatttctagtttattttcaaaaactcaaggtgtaaaaagattaaaactagcaatgactgcttcttgatttgctaaatcgtatacatcaattttatctacttgatattttttatttaattctaaatttgaaaaagttaaatttacttcttttttgaagccattttgatcaattgtgccttctgtagttaatgttttattcttgttggaatcatcaaagtaataaacttttatttttttattttgattaaaatctactttagaattttttagatcatcgtttatatcaatttttgcatctacagaatcaaaagtccttgattttacttcaaagttagaaaatgtttgagagattttcaatgaatcacttatattaaaatccttaactgaaaaatttgttttttgttttgaattatcgagtttttctaaagttaaaaatttgagtgtatattctttgtttacttctaaatctttaagatctaatatatattctaaaactttagaatcttttagttctacaaaagaagtttgcgcaattttattatcactagaatgatattctaatgacaacttattatttaaatataaatctgataatttagaaaactttaattttattttgtatgaagagtgtttgtcagttaatttttgtgaatctacttctctttgtagagtgatttttacatcttcttcgttaataaagctaatattttgtgcaaaatcttgtttgttataaataatattgtcagtgtttttacctacattttctaaagcttttgtaggttttgaaacaaattttattttatctaatgtataaatagaatttgcagtcaaattagaaacaacaaactctattttgtatttattatttgcatctttagtaattttagctttagattcgatttttttatcttgtgattctaatgaaactaaaacttcttgattatcttcaagaatattatcttcgctagttaaaaaaatattaattttatattcattttccttcatttttgaagcaaaatttgaaaaatcaaagctaatgtctttggtttttgtaataaaagtttttattaattcagtaggtaaatatatcgggttttttattgcagtatctacgtaggtagtagaattgattttatattcagaatttgaatctaaatcgtttaaattaaacactaatttattattatttatagtagaaattgcttctttttgtgtgttgttttttatatttaaaacaaataacttcacttctttttctgaagcaatttgattattttgtgctagtgtaaattctacatttgcagatgtaggaccaacattataaaaatttacattatttactgtagttaatgtattgtcaatagcagactgttgtgtatgttcttggtttgttgaagaactagcaaaaacaaaacgaatatttcaatctcttagattaattgagattttatcttgttcaatagattttagcctaaaaattccaattgtgttaaaagatgtttgttttagtctaataataccattaccatctgttgtctcagaaaatgaaattaacttatgattattttgatcttcaaaagtaagttgtacttttttatttgcagataattccttgtttagtctgatttcttgtggttcaatagcattatctcaagtgatatttcttaaattaatttgaggatctagttttaaaattaattcagtggccttatcatcttcataaagacctgttaacaaaaaataaggtctagcaaatttttctgtaactgaaggataataaataatagcttctgcattttcatttacagaagaaatttcgacttttggaactgaatttggttcttcaaatttggcaaaaacaactttatttgcatatttagcatctaatttaattttcgcagctatatcggaagtactattttgttctctttgtttatattctagtttatattgtttgttttgacttaatttattaacattagaatttgtataagctaaaggtacagcaatagatacagttattacaaagaagataacaactgctagtataataattcaaaatttttttcttagtattttcatgattaattcctctattttattttttgttgtaataatatacactaaaaaataaaaattacaacaattgagcagatcctcttttcttagaaaaatagaaaaagggatctgcccaaaagtgtgttttcttaaattttttttggcaaaaatcaaaaaaaaaaaaaaaaagaataaaatttataaatagtgatggagggtaagtgtatgaaaaaagtaaaaagtcttttattattatctgtaattccttcatttttctttttaatttcttgtactcaagaacaaactcaaaatcaaattttagaagaagtttcttcaaaaatgaagcagtttttaaatgaagatgaaaaattaaaatcagatgtaattcaaaaattagatttcaaaaagatttctgaaaacaaagcaagtttagatattactttagaatcaagttttatgtcaattttttcaaatccaaaagctcgactcaacttagaagtaaaaatttccaacattaataagcgaatttacaaaagaaagaatgaatttgaaaaaaataatgcaacttttttaattgataatataaatccaagtcttgattataaagtagaaattattaaaattaatgataaagaagttgctttaaccgaatctgaatccaataattttcactttcaaataaaagctacaaaaccagcgccaaaaaaagaagaagaaccagcaaataacaatacaccacctactcaagaaagtagtcaacaagaacagccaaaaaataatgattcatcctcacaagaacaatctcaaccagataaaaacgaaccacaacaagatcaaaaaacaccaagctctgataatcaaggacaatttactcttcctaataattttcgttttccaactcaacaaactgatttatctgcgaatgaatatccttcttttgcttcaaaatatcgagccattgatccccaagttttatataaagaactttatgatagaaccttttctgttaaatttggaataactttaaataaaggcgttaaaaattatggttcacctgaaaacaaatttttagcaactgaaaatggaacaacttgacttttagattatcataaaaaagatgaaaataattacaagttattttttgccacaaaccttcatgttgcttcacatttatcaaatactttagatgaaaatcttttaaaaaattttaattatgaagatccaagtcataataaagcaacttctatttctttaggtaaatcttcaacagaacctaatagttttttaatgcacaataataactatgatttttcaactaatcaaaataatataactaaattttatgcttcagatcctaattttaaaaatgcaaattattcagatctatctgcatcagttacaaccaaaactgaagctttttctgctcctaaattaatttttgctggttatgactttattgatcgcaaatatatccaaccttttcaagatgaactacaacaaagagtaaaaagtactttggatcattctacagatgatgaagaaactaatgaatatagtgaatacaaaatactccaaaatgctttaaaaactaaagaatttattcctttatacacagattttgctgtttttgaattagatgttaatttagctaatgcagattcaacactaaagagttgaattttaaaagcaattaatgcattaaatgaatatataaaacgaaataaagaaaatgaactcccaaatcaagacaaatctatttctaattatatgcaaagtatggactatgtttctgctaaatatttgtccaacaatagccaatatttaactaattctaaaaatgcttatgtattagggtatcctggaattgataacgggaaatcgacattagcttgaaataatcctacagagagaaacgatgatactaacccgccttcttattgaagatcaccaaaaaataaagaagcttttgctatttcaagtgatggataccaacaaaaaatgctaaatcaaaatttaaatccatatactaaagtttttcatagggttttaggtgattattatggttttactaataatataaaattttcttcactttatttcggtgcctcagggtcactagtttacaacgaatttggacaaatgattggaatttatagtggtgtgcaagtaaatggagaaaaatgaaatttattaaaatttgcatcgtatactccatttttgctttcaaatgattttagagatggagataataataaagttattaaagcatataatttaattgatggttctaataaacaaaaatttcctgctcaaacacgttcttatagacaaaatttacaagaaatttatccaaatggatttgaaaatggaaattttacaacagcattatttccaaatggttttaaataaaaaacaacaaaaaagaagcattgtagcttcttttttgtttatagttttaaattaatctaaagaaattatttgatcaaatttagataaaaatttattattgaaatgatgtgttataaaaataagtgttaaatctttatttgaaagtaaaccataaactattttgtcaaaattttctttatctaaactagataatccttcatcaatgatcaaaatttctttaggtttgtataatgatctaccaagatgaattttttgaatttgaccagtagaaaaattatctgtgtctatctctatcgttttttctagttctagattttgatagtttattttgtctaacaacggaattatttcttctttagtttttgtttctaaaagggtaatattttctaaagctgatgcattaattaaatctgaattattatacacatagttaatatattcatttatagaaccgggttttaattttttaatgtcatatttgttatttattaggatttgacctttaaattccttctcaattcctaataaaatccttgaaaatgttgatttccctgaaccattagcaccttttaataaatactttttacctttttggatttctaaatttaaattattaaataagattctatcttcaattttatagtttaaatttttaatactaattgaagagaaagcttcttctaaatcttgcaattcattttttggattttctacttcaaaaagaggattttgtttaaaatttttgatattttttctacttgctattaaattaggaagtaaatcaaaaagttcttctatattagtgaaaaaagaatcaaaacttaattgggctaatgccattaaagaaatatttgcaaatatagctacttgatcatttaagttattataagaatttcaaagagaaaagaatactaatgatatggtaactaaaaatgcaaataatttacttgtatttttgtttacaaaagaaataaaattggataattttcaatattttttttcatattttaaaagactttgatattttatgtctataacaccttctagtttatcgaatttatttaaagcatataaagttggtaagtttttcaaaaaatcagctaaaaatgaattaaattgtgattgtttttctagtgtgctttctaataaaatacttactttcttagataaaaaagttgtgtataaaaagaaaattatcaaaatcaaaattgttgctaaacccagtattcaaaaaaaataaaatattatacctaaagtgattgtaataatagaaatgatttcagtaatcttgaataatttagtataaaaagttgaaacaattgtttcaatagtattgttcatttgtgaatagtaataaccaggtgatttttcattatactctttaaaagttaccctaagtaaaaaagactgaaaacgcttaattagcttcactttgtgatgaattaaaaaacctttaaaataagctgtatttattgtttcaaaaagtcttaaaattagtcaaactaaaaagtaagatatacttcaaaataaaaggaaaaaccaatttttatttatgatagaataaaaaataaagtatggtgaaattatattaaaaacattaaaactgacggtaaatattacgtaaattcagtttcaaataataaatcaaaaatgctttggtggttgtttcattgcttttcctataattcaataatttcatcaaataaatgcttaatttcttctggaatatgatggctaacaataaaaatagttttattcttctgagataaaaaatctttataaatttttaaaacatcctttttatatatattgtcaaaagcttcatccaaacacataatatttaagtcttgatattctaatcttgcaagggcaatattctgtttttcaccttcagataagatagaatcatttatttctttgtttaaatctgaaaattctaaaatatcatattttttaactaaagattctaatttttctttatttaaattgttatctcataaacttatattattttctaaagtatcttgaaaaataatattttcatttgtaagtaaagctatattttgtcttaaacttttatctaaaatgtttttgtattccaaatggttatttattagtatttgaccttcatagttagtaattagtcctgaaataagttttaaaagagttgactttcctcttcctgaaggcgatactattccgtattttttagttgttaaaaattcaagatttaaattttgaaaaatactttcattttcattgtacttaaaacttaaatttttaatagaaatgctttttatttcttcatttaattctctttttatagaagaattatcttcttttgaaggaagaaaaatttctaaataaggtataaaacttttaaaaattaaaacaaaggaaaagactgaagaaactgaggcaataaaactggttgttaaagaaaataaactaataaaagattctcaagcaaatgttttattgtatgttaaaactgataaagtaattaatgaactaaataaaaaaactgaaaaaataatttctaaaaaatattgactgtaataaaactgtttaaaaaattgaaattcttttgtgtacttatccaaaacttggttttttaaaaaggatttaaaaatctttcttttattgaaaaagtaaaatagcttgaataagccaaaaagtttaatttgtttttttgcattcaaacttaatatttcttctaatttttcttgtaatttgtttaagactggagaaaattttactagtataataatagaaattattaaagctataaagcaatgtaaaataattattcaaattttaatttctgtcaaaaataaaaacaaaatagtgagcggaatattaaaaaatgaagaaaaaagaaaagaataaattagttcattcatagaaaaaacaatcgataaatttacattatacttagaaatatatgaagttttgttttctaaaatataatcatatgattgtttagctattttattagttaaaaaattaatatttttctcttggtgttatataaaacattatttgttttaaaaattaatattaattcaatgaaaaaaaataaaacaaaagaaacaacaggcatgcaaattcaagttataaattctggattttgaatttctactttattttttataaattttattaaataagaataagtaaacaaatgaagatttaaaaaagaataaaataaaaacttaagaaacaaaattaggaagttggatgttttatttaaattaataaaataattaataatgctaaaaagtttcataattttgaggtgatacccttttcttaataaaattttaaataattaaattaattataatttggaatgaatgtttccctaaatttaatgggagacattcattttattttatctttaattcgtttgtgattgtaataataaatataatttgcaattgctttgtgaagttgtttaaaagttaaaaattctttttcgcgaccataaaaacattctctttttaatgtcccaaaaaacgattcaataatgctattatctaaacaatttccttttcgagacatggactgagttattcctttttgttttaatttttctgaaaattgtttatgttgatattgtcaaccttaatcactgtgaaaaattaaaccctcaagatttttgtgctttgaaaatgctctttgaagcatttttctaatttgttggttgttagcgcgtagacaaatctcaagcaataacttcgccattaaacatatctaaaattggcgataaatatgcttttccaaatggtccgctaaattcagttacatctgtagttcatttttgatttggttgagtagcaacaaaatttctatttaaatattgtctgcaattttgccaactgttcctttgtaagatttgtattttcttctagaacaaattgctttgagattgaatttttccattaatctgcgaactttttttaaatccaattttatattctctattattaagttcagtttttattcttctttttccatatcttgctttattttcttcaaaaataagcttcatttggcttataatttcttcatttttcttgtcaaaatcttcttttttgagttcataataaaaagtagatataggaatagaaaactcttttaatacttgagttaatcgcaggtttttatcaacttttactctattataaatttttttattttttcttgccttggttgatttgagtcaaagatctttaccaaggtttttcacttttttagtacttcattttccttttttaaaagtttaatttctttttcaaagtttttttctcttttttaaagagtttgatttcttctctaagaaatttaagttcttcatatacagatattaaagaatttgattcatctttgctgtcaaaattttttgatacctttttaggtttattattacgaatcttagatttcactattggtcttcctttatttaattctaaaccactaattcccgattctaaatattttttcgctgaaaaagatattagacttgaattaagattattttcaagtgaaattttaacaattggttcaccagctaaaaatcttttaactatgttaatctttgatctatagttcactttttatttcgtggttttttcttaagaccttcaactcctaatttgtcataaattttttctcaaaaatttacttgatttaaaaaattttctgatttgtattagcaaaatcaggctttttaattttaattccttttttgtattttttttacacattctaatttaaattctaatgaatatttcataaaaaatccccttttctatttttctaagaaaaggggatctactcaatttacctgtttttttatatttttaaatttgaacttttataaacttgaattagagtcttactctttgtaatttaatccaagagcattcaagattacttgtagcacaaagttaaatggtttgttgtagtgaggtaagaaatagaaatctgaaagagctatttctggtaatgtcattttcttttgaattgctaatgccaagaagaaaattacctctgtatgattaaaacttcttccatatgaaccaatttgagcacctaataatcttttggattctttttcatatgttattttaattcaaacttttgatttatgttgcataaattctggacgatctcagtcttctaaatattctgcagcatgttcatcaatatgtgggttatttttgcatccatttgatgagaatcctgttgatgcaaaattaaatccaaatactgaaattgcgtttgtacctacataacctgggaatggtaatacttcttcaccttttgctaagtggaatgctgccactattcctgatttaactgcatttgtagctaaagcaatgtgagcgtgtgaatcagttgcattatgtcacattgaagctgaatcaccaattacataaacatctttatcaactgttgatctttggaattcatctactaaaacagcaccatttggtaatttttctaaaccttctaaaatttgagtatttggtctaaatccaatagctaaaatcactaaatcagcttcatatgtgtgtttatctgtttgaacacctgaaactctaacaccatcttcggttaagaatttttcaactttttctccaaagtttaattcaattccgtgatttctaattgcatattccatttttgaagtaaattcttcatcaaaatagttaggaataattctggattgcatatcaattagagtaacttttttaccatatttgtggaaagcttctagtaattcaataccaatgtaaccaccaccaataataataacgttttgtaaagttgggtctagtgcttttgctttaatttcttttgcatgtgtgtaagttttagaaattaaaacattttctaaattaacaccttcaaatggtggaacaattggtcatgttcctccagcaaaaactaatttatcatatgtgtctttaaattcttcacctgttcttagatttttaaccactacgtatttttcttcacggttaatttcaacaacatcgtgttctaggtggactgaaattcctaaagattttaattcttcaacatttgaataaaataatccacttggatcttcaaattcttgccctactcaaagagcaattccacatcctaagaaagaaatatctgtgtttctgtcgtaagttactaattcagctgtaagatttaattttctaaatgttcttaaaaatgaggtacctgcgtgatttgtacctactgaaataattttcatgtattttcctttgaaattttaatattaaaattgaatttatacccttaaattatatgttttttattccttttttctaaatatttttgtctatttttagtaaaaaactttgaaggaatttgaataattttattaattctgccatcttttactaattgagttctaaattcttgaatttctttattgttttccataaaaattaaatggcctgtaacttcatcaaaagtaaatcaatttttatcaaaagcagtgtgtaaatcaggagataaaactaagcaattttcataatcttctatagcaaataaaagcttttgatattcgttttggttattggattgtttatcaattttaattaattctcttttaatttctgaaactggtcaaatatgagctttttctttaggaagaaaatcaaaaagcatattttgttgttttgcaatattttgttgaaatttttgccgactgtttttgatatctttttctatattttttattgaaattaattcctttaattccttaagttttttcttgcctaaatcttttctttcatagaaatttttattatggttagaaagatattgaattatttttaaaattttgaaaaattttgaatcttgttgggtcgctttttgtacaaataattgaaaataattttgttttttgcttgtatcattaaaaatttgttctcttaagtcttcaatttcaacaattgggtaaaaaaattagtaaaaaatatagcaaaattatttttaaaataaacgtcttctttttctaaaattattggagcattgtttggagacataagttctcctgaaggatttgaacctctagttaaagcaataatgtttttgattgtactttcataatcatattttagaaaatgatttagttttttaagctgatcttgacttaagttcactaaatgatgatcaatttttgaagctcgtggtttttgttgtaagcctaataaagaaaaaactttttctctctttttaaaatttgtattcatacttttaaatcagctttgggttgttagtatatctatttcacacatttctaattcataatgaaaataatgaattaccaaagatgaataatcatatataaatttaatttttcctttaaatttagcagcaaatttgtcttcttttttaaagttatttgaaacaatattaatttcatctcagtaaatgtttttatttatggccattaaaattcctctttgatttctagaattaaatttttaaaaatatattcaagaacttcaactgaaatagaatttccagccataaatatgattttgttttctgagactaaattagtttctaaaattttatctacatctttcgaagaaaaacccatatatttaaaggattcataagcattaatatatctaaaaatatctttgtttttgaagtaaaatttcaatcttgaatttgctccagaagcagttaaagtaggtccaaaacctttgttgttataaatataattttctgaattaaaattggatcaattttttataaaagctttagaaatgttgttagttgttgttttaaactcagtaattcctttttcttttattttagaagtaagttctagaatttgagcagttggttgaaaatttgattctaaaattctacttaaatcattattgtgctttatttttaaaggtcatttaaaaggcttgttatttaatttagaaaccataaatactctttctctgttttgagaagaaccaaaatctgttgaattcaaaactttccaactcgagttatatcctaaagtttctaaaaatttaattcaatcttcaaattgagacataaattttttatttgttaatgatttaacattttccatcaataaagttttgggtaatctgtcttgattttgctttaaaatcctttttacttgaagcaataaaccacttcttgtattatcttgaattcccaattgatttccttgttgcgaaagatcttgacaaggaaatgaataagtaaaaatatctatgtctttgggtataatctgaactttgttaatatcagtgtagaatttcttgtcttggtttgggttagttattgtattaataaagggaagaagatattgataataattgtttaatttttcttcattttgcttcataaaatagtttttagaaacaggtgatttactgtctttagataaagttaaaaactgaagttggcttaacattaattctctagaaacatttactttttttgatttatataaatgaattttctgataacttataattgcatcaagatatcactcaataagacctagtgattctacttctatatccaaacttttttcaatattttttaaagctttaaattgtgatcctaaacctgcaaatacttcaaaaacttttatttttttattcatttagcgtccattttaaaaatttaatatacactaagtatatatatatatatagcaagcaaaaagtactactttattgtaaaaaagcttcattttagaagaaaaaataggagaaattatctctgtaaaataaaaattttagtaagaatttaaaattcatttataatttaaaatcactaattagggagggaaaaatggcaaaagtagttattggaatgtcaggaggagttgactcttcagttgcagcatatttattaaaacaacaaggatatgaagtcattggtgtttttatgcgtaattgagattcaacactaaacaatgacattaaaggaaatgattcttataatgattttatttgtcctcaagaaaaagattgacaagatgcacaagaagtgtgtaaaaaactaaatattcctatttacagagtagattttattaaagaatattgagaagaagtttttgaagattttattgaaaaatataaaagcggtaaaactccaaatccagatattttatgcaacaaaaatattaaatttaagcattttttagactatgcattaaaaacttttaatgcagattttattgctatgggacactatgcaaaaactgaaaatggcaagctttttaaagcaaaagacttgacaaaagatcaaagttatttccttgctcaattaaacaattatcaactaagcaaaacaatttttcctctagctaatataacaaaaactgaagttagaaaaatagcaactgaacttgatttaataactcaaaacaaaaaagattcaacagggatttgcttcataggagaaagaaaatttactgattttttacaaaactatattcctgctcaacctggtgatattgtggatatttcaaaaaataaaaaaataggaaaacacataggaattatgtactttactttgggccaaagaaagggtttaggtcttaacggaatggatcagccttattttgtagttgggcacaatttagaacaaaaaatcctttatgttgcgccacaaaaccaagaacaatgattaatttctgataaagcagatggtataaatttaaacctaattgaaacaaattttgatccaaataaactctctgttaaatttagatacagacaagaagatattcctgctaaaattcaaatcctagataatgctaaaattgttgttgaatatcctcaaggttttaaagctgtaaccccagggcaagaagttgtgatttatcaagaagataaatgtattggagctgcaacaattgataaaatttacttcaaaaacaaagtgttaaattacgtataaaattattagcactttaaactcttttgtgctaaaatttctttctatgagtaaaaaagattattatgaagtattaggaattagtaaatccgcaacagaagctgagattaaaaaagcatatcgtagtttagcaatgaaatatcaccctgataaaaataaggaaaaagatgctgaagctaaatttaaagaaataaatgaagcttacgaaatcctttctgataaagataaaagagctaaatatgatcaattcgggcattctgcttttgatccaaacagcggattcggtggtggtagctactctcagggatttagtggtttttcagacttttttagtgatatgttttcagattttggttcgggttttggctttaataattcttcaagacaaacaaacagaccaataaaaggaagcaattatcaagcaaatgtaactattagttttatagaatctattttaggaaaaacaatcaaacaagatttagataaatatgaaacttgtccaacttgtgatggattaggtgctgaatccaaaaatgatttactagaatgttctaattgtcacggctctggatttgttgaagaatatgtttcactaggtgcatttggaaaaatgaaaaacacaacagtgtgttcaaaatgtgctggtcaaggaaaaataattactaaaaaatgttcacaatgtaaaggtcaaaaaattgttaaagtaacaaaaaatattgatatcgcgattccagccgggattagaaatggtgatagtatgacattaacaggttttggtggaccaggacaaaacaaaggaccaagtggtgatttatatataaaaattaatgtaacaaatcacaaacactacacaagagctgggaatgacattcacttaacattacctgtttctgttgttgatataattcaagaaaacgcagtcgaagttccaactccttatggcatggaaactattagtctaaaaaataataacaaatcaggagatgtaattactatttatcataaaggagcaaaagatcctagaaataaaaatattattggggactttaaagttcatttagaattatatgttcctgaattatccagatcagagaaaaaagatcttagtcaaatttttaaatcagttaaagataaaacaaaagcaaaatggcttaaagatttttaataaattaaaacaaaaaaccggataaaatccggttttttgttttaaaaagtttttttatttgtggtgtaatataaattcaactaatgttttaaccataacacctgttggatttttatccacatttgctgttcctgcaatatctaagtgaattaaaggtaagttttctctaaattcttcaacaaacatagcagctgaagaagaaccagcttttcctgaataatcagcgtttactatatctgcaactggtgaagaattatttcctttagcaaattcagcatgtaatggcattcttcaaactaattcatctgctaattcagcagcttttctaaattcttttcagaatgaatcatctgtagcaaaagtgcctgtaaatgttgatcctaaagcaatggacatagcacctgttaatgttgcgattgtgaataatttattagcttttaattctctaattgcatatgttaaagcatcacctaaaattagtcttccctcagcatcagtgtttgttatttctactgattttccattcatagattttcaaacattatctggtaaattagcatctccatttactctattatctgttaaaggtaaaactgcaactacatttacttttggtgaaaatttagcgattgtgtcaatagctgatgcagcaataattgcacctgacatatcgtatttcatacctctcataaacatacctgttttaatgttgtatccacctgagtcaaaagtgattcctttacctacgagtgcaattttttcttctgaatcaggatttccattatactcaacagttactaatcttggttgataaactgaacctttgttaacagctaataataaattcattcctaaattttgaatttgtgtttttcctaaaactctaatttttaaatttgcatttgtacttaatttttctacaattttatctgctaagaattctgaattacaaatatttggaggtgtattttggaaaagacgagcaaaatttacagcatttgctattgtttctgctttattaataaaatcttgaaaatcttctaatcttgaagaaactaatgttaaatctttaatttttgctcttgttttttctttatcacttctttgtgaataaacatcagcatttaaataaatatatctatcaactaatttttctacaaattctctttgtgcttttgctgataaaaattcaaaaaatgcatctaaatctacttctaattctcttggatacttagctaaaagtgaagcaatttttttcatttcttctagagaaagttctttagcttcatctaaataaagtaatacttctctttctgttaaaaattctgtagttgcaaatttttctttttgtaaaaattctctttcattagtattaaaagccggtcttaatactaatgaattttctgaaaacatttgtgaatatttaatcattttcatccttcttttatgttgttaatattaattttagatagatcttttaattataaaacattttaaaattttgcttctaaatagtttatatttttatctttttggcttcattttatttcataatcagtaaagatattatcttcattttttgcatctgcatgaagatttgtggttttgtataaaatttgtgcaccaaattcagttaatgactcaagggaatactcaaaaaaaccatcattatctgtttttagttttaaaattccttcttttgaaagtaaatttttataaattactaaaaaatctttatatgttaaacgtcgttttagatgtcgttttttaggtcatggatcagaaaatgttaatcaaattaaatctgttgttccacttattttttctaaaatgtctttaacatctgaacaaataataaaaaaattagttaaattatattttttagcttttttaatcgctttaacagctgctgaatcaaatttttcaattcctaaaaattttttatcaggatttaatctcgctagttcaactaacatatctccttttcccattccaatttcaactattcaattagcatctatttgaagtggaaaattttctattaaaaaattcgactgtctcaattgttctaatgcatcaggaatttttttaagtctcatttatatcctccttagtaaaaaaataaagcaaattttcatctgctttattttaattatttattatttttattcctctcttaaatgagttggaggaaagtgaactttacatttactattgtgaatacgagtaattctatgaggatctgtatcttctagtaaatgatcttcttctattaataatgcaggttggtcaaatggttggtgaactgtgtcctctgctgtttcttcaactaattcttgaggttcaatttcttcaactactttttctctagaagatcagaacttaattgctgtaccttctgcatccttcatagtacctcttcatatttgaactagtaaaaaaagtcatcaaactagtaataatcccatgaatacaagagctactataataacaactcaaaaaccatcagttcctcttgataatgcaccactttcttttactgcaactgcaacaattatcattaatattgaaatccagaaaagacctgctcttacaattcctagaaagaaattttttaaataaaaatgactggctcctcaagtaaaaccaaaaaataattcttgtaaaaaagttttcctttgagttttcccgtcatatctaattttgtttaacatgtttgtataagtatttccttagtttttattgataataattataacagttttttatcttttttctttatttttaaagattaaatcagaaaaaacaaaagctataatatctgtttttagattgtaataaaattttgcattattttcaattaatttttcattttttccttgattttcttcattagaaaaaatttctttggaaaaattttctaaatttaaatttctttcttgtctggttcagtttttgttaggaattaaaatgtaaggtgataaaaaaacagaagtatttttaattttattttttaaattattataagtgtgtacaacattaatagtaaaaacaaaattgtcttgatttttgattaaaatttgatattttttcgaatactcatttacttctgaaattggtttgtctaaattatcttcaatttttttataaacaatatcgaaaaaaacattagattgtggtctataaaaacttgaattttctgaatttgattttctaataaaagcaatttgactactatcttgattattgatatttggtattttcataaaataaattttgttaacataaaataaaaatcaaagtcaatttttggaaaaaagattggttattttttccaaagcaactgaataagcatatggaatgccgtcagaatccatatttgaataattataataatacaaataacctttaattagtttggagtactcttctgaatcaagaaatttttgtgaattaatgtaaccttctttttctgttgtgtgaaggaacacaagatctaacaaatttgaaattacttgattatttaaaaaagtttgtcattctttttcgtgttgttgtgctggtgttaattcttcacttttattgtgttcaagcgcaaccaaaggtacatcagattttgattcttgagtagaacaagaaactaaaattaatgaaggtaaaaataataataagaaacttcatttattttttttaatcattgtatcctctgcgatttactaaaattgttctactaaaaaacttcatttttgaagctaaatttcttttttgaatttgaaaattatgattttcatattttaaaaaacttttgtcttttgcatctagaaaagaattagattttgtaggtaaagactttaaatttctattggtttgaagaatttctgaagaaatatttctaaaactatatttttgaaaatctcatttgttttttaaaaaatttaagctcgaatttaaagaaatgtaataattatttttaaaaatattatatttagattcttcattaatagattggatattcaaatatttatcattgatttgatcaactgcttgttgaattttttctttataactagcttgaatttctttaatttgtttttcaatttcttcttctgatttttgttcttttttttctaatttattgttattttctcttaaagcttcaatttcttgtgcttcactagcttgaaaatttgcattaattctttttatttcttctgacttgctttttaatgagtaatttaaaattttattatgaatttcatctataaaactaacaataaaatttggattatctttataaactaaaagatcaaaatctaatctggcataaattttttgatctttttcaaatgttcaaagtcttagaattttatttttatcaaaaattaaataataaatattttgtgaatctcaataagaattttcagaaacaatttgtttttttataaataaaaatttttcactttcaatttgtaaaaatgtttgtggttgattttcaaaatcttctttttcttcagtataaggggaataagaaaaagaatatggattaaaagcaaattcaaattccttaatattgtttaatataaacaatcaattatttgtgaaattgttataaattgtatgttttgcataactttttaaatcttgagattgggttgtatcaattttgaataaacttggattataaaaagagaaagaatattttaattcttcaagtagttgggttgtatttaaattattttcttgaaaaatataagcatctttttgtttgtctctttcaatgtaaatattgttaagaagttgagttattgaactattttcttttttataaactttattttcaggtatataaaaatttgaaacctctgcacaagaaataagcaaaaaactagaagataaaactggaaaaaacaataaataatttttaattttcttcatcatttgcaatttcctgctcatattttaaaatatttttgtttataaaaaagtgatctagtctttgttctttcttacctgaataaatgatttttccttcatttatgaaggtaactgagtcaactagttcttccatttcttctaaattgtttgtacttattaaaattgttttaccttgatgttttaactgctttagcatataaacaacatctaatttacttgtgtaatccaaacgagataatggttcatctaaaatcacaaaacttggattgtggatcaaagcttgaattaatgaaatctttcttttttgtcctggtgaaaaataataaggtttttgctgttttaaatgctctattttaaaaattgctaaaaacttatctattcttttctctatagtttctataggtaaatttgaaatttttcctaataatagtaagtatttatgcgtgctcatttctctaggaaaatcaagcacatcaggaacatatccaatgtgtttttttgagtttgcaagacgtgaatttacattattaataaaaatttctcctgtgtaatttgtataagaatctacaattgctttaataattgagctttttcctgatccattatcaccaattagtgcatgaatttcgttatgagctactaaaaaattaattttatttactatagctttttttagttttaaattaactttcaaattcttaacttttaacattcatttggatttcattatctataatcctttttattgtgtaaagaatataaagaaaataacattatcgcactaattaaaattcattcaagcacaaatgtatttttctttacaacatgagttttaacagttacttgatacacttcttcaactggttggaataaaaagttattggaatcacttaaatgatatctataaattgttttgttgttgatttctctttgttctgccacataagaagcataaccaccaatgaaataatcttgattatctatactaattgaaaatttctctggtttgtaacttccgtcttcattttttaataatgtattaaaaattggtgattgattattgttaaaaaatagataataaattaaagctgttgcaatataaatatttttttctaaattactttttattttagaagtgtctaaaaaagaatttaaaactacagtgttattatcagttaaatttttaaattgattttcttcattttgctttataaatgaagatattttctctaaatattgttgtttacttaaatgagtatttaatgaactataaaacaattttgcttgaattaaaaaggtcttagattctaaaatttgctttaaatattctcatttgattttacccactaaattattaggaacaccaaaaatttgatcatcttctttaaatggaaaattgaaattagatgcgtttttatttgcataaataatgtctttattttgttgattatcaaaaacagtgttattttttaaagaaccaggaactaaataatattttttagttggattatctaatgttaaattataagtgggtaatgacacaaaatggttgacttcgtagctattttctgctgattctaaaccatgataataaatataacttcctaaatctgaagtttctttatttggtttttgtcgtaacaatccttgattactgtaattaaaaacattaataaattgatacggtagtgataaataagaaatagcttgtcaaagttgtgaagaagatgatgatttatttcaagcatcagaaagaaaatttgcttgtttttggcttatttttgtattggaaacattttttggaattaaataaaaagtatcttcattgttatttaaataaaacttttctaaatctaaaattgtttgtgaatcagttttagaatctggaagatttaagtaatgagcataatttaaattacttggagttgcaaacacagaagtagctgtgcccaaaaaaagtaaaggtgtaaaaagtgcgattggtgttgttattgataatttaaaattaaatcttgaagctaaaagtcctgaaatagaaccaaaaatcaaaaaagcaaaaaggggtgaaaagaaatctcaacctgatcaagctttaatttgttcaatatttactatattaaaaacataaaaaattcagttgcaacccataaaaattaaagatcacgtgattgctaaaagaatacaaaacaaaatcttagttgcattaatatgttttcttgagtatggttttgtaaataaaatagtatctaatccatctctgtataaatcataaaaaacatttaaaaacttacaagaaccaaaaacaactgtaaaaagaagattaattaaaaaaaatacaaaactaaaaattaaaaaattatcttgagttgcaaaagaaaacgaaataagtgaaaaaataaagcttcacactatcattatggctggtagaatataagttgtttttctagaaaaaacatattgaattaatgagtttaagtataaatttttaaatattgataaattaaatggaattttcataagaaaatggttaaatttcgctttctaattaaactttttttatttgtttctttattataacaaataagaatttaaaataatatagttttgattataattattaattaatttaatatagaaaagatgaatatgaaaatagcaattgtaggggccgacaaggtttgtgtaggtttagtaaataatctcattctttcaaatgatcattatgagattctaattattgataaatttgaagggccaagagatggaaatgtacttgattttgaagacttttctggttttgcaagcactaaatttagtataaaagcagctagttatgcagagttaaaagatgttgatttattaattattggagcaaaagctagagctgtgccagggcagctagaacatgagttttatgaagaaaattcaaggataatttatgaaattgcttattttgtaaaacaatctggttttcttggattaacaattttattaactcaaccaaatgctgcattagcaaaattatatactgaagctactgaatttgaagctgaaaaaattattggttttggaactatgcttgaaaacttgagattgcataaactcttaaaggataaaatcgaacattacgaatttgatgcatctgttttaggtgataaaagtgataattttgctaactttgatgaaataaaagaaaaatacaaaatttctgatcaagattttttagctaattgtttaaattcaacaaacaaaaaagatttagatgtttttgttaaaaaagggcgagcacattttgctgcttcttttattttatttaagcttataaacagtatttatcataaaaaagaatttttctttactgctaatgtttttgttaaaaaatactatgaatttgaagataattttctttccgtacctgcagtgattaatcttcacggagttaagaaagtaaagaacttaattttatctaaagaagagcaacaacaattaatttcctaccaacacagacttaattatttatataataaaattaagaaaattcagttttaaataattaaaaaactcttcaaaaaagaagagttttttaattatttgcttttgtcaaaatcaaagtcgatcatagaaaagtctattggatcaccacctaaggattcttcataaactgttttatctagtggaccaattttaaatggattttgttctccaaaatgaagcattataaagaaatattgtttaaggttaaagtttgtttttttaccatttaaataatcaggcaaaattttcaatcaaggagataaagttacctttgaatctataattttggtttttgttgaatcatatatgtgcttaatattcaaatcaaaaacaaaattgtcttcatttgtgaataaaactttatattctttaaaataagttacagtatttgtagtggttgaaacttgatcaaaattattattaacaagttcatacaacatatttgtgaacaaattgttttttggtttgtaaaattgtgaactagatgtattagatgctctaatatcttcagtaaattcttcgcctgttttttgaaataaatccaaagattttaaagacttaatgaagtaaatattgtttatgtaatataaaaatcaaagtcagtcatttcttattgtttcaaaaatatcgtttcttgatttaatataaaaaagtggtttgctttcttcattataagcagctgtttctgttcttatatatgaataataaaagaagtcgtttttgagtctttggacttgtttttgagaatcaatttgtttttcaaattctatataactatttcttgcatcttcatttggataagctaattttaaaatattttgtatcactgaattttctagaaaaagacttcatgttgcttctttttgttgttgtaaagtaagttttttttgctctttttgtatttgttttaaatcagtcgttgtattaagttgggttgaacaagaaatcaacaatgataaaggaaaaaatgaagaaaaaatacttaatatttttttaattctcatttttatctccttttaattctagaagcatttgtgccacaaaaccatatctatgtttatgaataaaatcattttcaaaagcatcataaaatctttggatttggtgataaagtgcttgatggaaaatttcggttaaaatcttaactgataatttagttctagctttaggaaagtaataaattaatggattaaaagttactgcagattttccatcatttaaaactactttaatgttaatcagtgcattatttttaactatataaaaatctttataagttgttgattgaacagaagcatctccaacatgaatactttctaaattattattcacaaagtaataatctcctgcatcgtccaaagaatttagttcatctaaaaatttttgagaatgatgtacttttactttttctacagtattaaattgttcaggaaaataatatcaattagaaaacttaatttggaatttatctaaattttgaagaatgaataatcaattatctgaataaaatttttctagtttgtcaaaaatatctttatgttctttactaaaatttttgatatttttaggaagttgtttttgcagttctttgagttcttttagaattctttcttcattttctttaccttcttgtgttttcaagaaagtttctcaagctaagttgttttgattataagcagctttttttattacttcataaacattttgtgttgttttttcttcaattgtttcatttttgtttagaacatctttgttatgattaataaatttatcaaaatcagtagtttgttgaatttgttcagtagttggattttgaggttgatttacaacatttctttttaattgaattactgaagttacaacatctcgaaaagcaaatcttttataagatcatttttgttctaaagaatctaaacttgaaagtaatgttaaataatatgaatctttaaaaacatcatatttagctttttctctttgggttgcttgtttattaaattcaattgtttgttgttctttaattttttccaatttttcttctaaagttaatttggaatcaggattaaaaacgtcatcgtcgtcatcagtgttattttgatcacttgaacttgattcttcttcattttctgtagagttttgtgaattattagactttgtgcttgaatcagcttcactagaaatgtcagtgtcttgattgtctgaatttgaaccatttggatgctctttttttcactttttatacaattctatttttttcttttgcaaatcaggtgagtttaaattatctttattttttgtaaattcttttcattctttactatcaaaaaaagcatcatctatatcttcatctttgatatcttcttcgttggaatcactagaatttgtatctttttttgttgtatctttttgattagttgatccagaattattattagaacttgatccagtgcctgagccgctatcatttccatcgccaccatctgagcctttgtttgtgtttatgttatctctatcatcaaataaaactggtttataagttggattactttctgatggggttaataaagcttgttcggctttaatttttttatttagattattttgttcaaaatttttagattcttcttcaagttcacttaaaaattgacctaaagaagtaattggtttatcaaatactaaaacttcaaaatctaatcttgctaaaataacattatctttttcaaatgttcataatttaataattttgttgttgtcataaactaaataataaacatattcatttgtataataatcagattttgggaattgtttaaatttataaaattgaaaattgttactatcaaaagttataaatttgtttgtggtattattaaagtctttatcttcatctttaaaagaaatgtatttacctttgtatggattgtaagcaaagtaaaatttatctatattttgaagaataaacactcaattttttgtaaagtttcttaaaatattatttttagaaaaaacaattgttaacttactatcataaaatctatcattgacaaaaactgcgggattaacaaaggaaaaagaatattttaattcttctaaagttttgttagtatctaagtttaattgctttaaaatcaagtcatttttttcaagagttctttgactttgtttggttttatagctttgacttgttttgaattcatttgcagttggttctacttcataaacagagtctaacaagcgagataaactaggatttaagaactggctttctgggttattattttgagttttttcttcatttttaaaggaaactagattaggtgtagcacaagctacaaataaatgagaaattgcaaaaaaactaaaaattaacgggagttttttgttcatattattcctttatttgttcttctatgacttgattgtagtaaagatcatttagattttggttttttgctccagtgtagtaaatttttcctttatttattaaagtaactgaatctactatgtgatcaatttcagaaagattatgactgcttaaaaaaatagtttttccttcttttttaagattttgaatgatttggataaaatcaaatctacttgtgggatctagattagctaagggttcatctaaaataattaattctggatcgtgaattagagcttgaattaatgcaatttttcttttttgacctgaagaaaaatcatatggttttgcatttgcaagatcttgaatatttaatgaagataaaaataaatcaatatctttgcttgctttttgtttatccaaatttgaaagtgttgctaataaaattaaatattcttttgtttttaattctttaggaaataaagacttttcaggaacatatcctaaaaattttttagcatcaggagtcttgttagaaaagccattaatcaaaatttcaccttgatagtctctataagcatctactatggatttgataattgttgttttaccagcaccgttttcacctataaaagcgtgaatttgccctttgtgaacttcaaaattaatatcttgaactcctctattagaatttttataaattttattaagatttgatacttttaaaactactgtgttcattatttataatcttttctactatataaaatatatattcctattaataaaccacttgcaattatgattcataaaactaaaaatactggtttttgcaaagctttgtttattgggtgaacttcaacaaggtcaataactggttggaataaaaagttatcacttggtgttaaatcgtaacgataaacaattttttcttcttttggactattaggggtgctatctgtaggtctttgtacaattttggattgtggagtataagaagcatatcctcctatgttataaatttgatcatttatcttgattttgaaggtttctggatcataattttgaagttcattttttaataaagtatctaaaatttgggatcttggatcgttaaaaaataagtaataaattagcgaagtagctatataaattttcttttctgttattgattgaacttcttcaatattgattttattttttaaaactgctgttttctcatcatggatttgagaataattaaaacttgaactttcttttaaaaatgaagatatttcattcaaaatttctgctttagttgcatttgattttatcttagtgaagaaaagtttagctgtttttaaaaaagctggtgattctaaaacttctttaatatattttcattttaatctaccaactagagatgaatttattggtgaagattcttcatcttctgggaataccacatctgaattacttgcattttcatttgcataaataatttctcgattatctaattttccttcaaattgtgtattgttttttaaagaacctggaattaaataagcttgtttgtaaagtttattatttacaaaaacatcgtattttttaagttcttgtgttgaattttgaatagaataattattttcagctgtttgcaaattagagtaataaatgtagttacttaaagcattttcatttgtttgtcctagacttttaatagcatcttcatctttgatattaaaaatgttgataaattgataaggaactaaaatgtaagaaaaagcttgtcatagtgttgcagagttttgtgatttgttttttgcttcatttaagaagttaatttgttgttgatctaagaagagattgtctacttgttttggaattaaatagtagttatctttattgttatttaagtaaaatttttctgttcttaaaattgtatttgaatcagtatttgggtatttgagattaaaatattgagctaatttttcgttagttggtgttgaataaaaagcaggaacactacctaaaaaaagtaaaggtgtaaaaactaaaattggtaaacttaaagaaacttttgaactaaattttaaaactaacaatcctgaaagtgaaccaaaaattaaaaaagtaaaaagtggtgaaaagaaagctcaaatataaaacatattgacttgatctatatatttgatattaataagaaaaaaaatggtgaaatttatgtaaaaaagtaaagatcatatgctagctaaaaaaatcaaaaataaaattttggttacaatgatatattttctagtatatggttttgtaaaagttataagatctattccttgattatttaaatctttgaaaatatttaaaaatttatatgaactataaactactgtaaaaagtagattaataaataaagttatataagtaaaaattaaaaatgtcttactggaagtagaagtaaaaaaagctacaagagctaaaattaaagttaaaaaggaagatacaattggcaaagcaaaagtactgtattttttgaaaattattttaaataaaaatttaaaataattattatttttaaatggtgaagaagaaatagttttattcatcactctttctactaaaaatataaatatttttaaaaaatgtgtctaatttaaataaaaaataatatgctaattatatacaaaaaaattaaattatttttttattgcaacaaaaatatcaaagataaagaaaaaagaaggaacttttccttctttttttattctgaatcaactttaatgttagaaatttgtataactaaatcatctaaattaatatttgcatttttctctaattcttttcttttttcaattaaaaattcaatttttctagagtttttgttgtatatattatcaaaaacaaaaaaacttgtaatacttgctaaaaaagcaataatagcgtttaaaaaagctatggccacaaataaacgaactgctgttaaattaggatttttagctatagagtaagcagataaaattccattaaaagctgccattaaaatcaaaataatgctagtgataataaaaatagattttgaaattctggctttttttgaaagaaaagaaatttgttcttttattctattaatttcactttctctactcatgtttttcctctctagcttttaatcgactaatgttaccaaaatagtcattgaccttttctaataaagtaagttcaggatttggattgtttttgtattttccttctttagcgtggaataaaattaattctaatcctaaaaaattgttgagttctttgtttctaattcatttatttttgactaaaaacagagcaattaatccatttacaatacttaaaataatgttgattcataaagtaaaaataggtcattggtcaacaacaactggtttatctccactagtatctgtaatttgaaaaatagtagcaaagggtttaaattcttcaagtcgagaagaagctagtttaaacacacccataatagctgcaaaaaatgcaaaaaagatcgcaaataaagaacaacttcaaaaaatgatttggtaaattttggctttttttgaagttttggaataaagataatttgcaaattccaaaccactacttgttagcttaactgattttaacattactttttcactcctaaaattgcttttttcagcaacttaagtttagaaacatctttttttgctaaataaaaatcattaatttctttaaaatctagttcaaaagtttcgtatgaataattaggatctgattcaatttttaagtaaatataatttagctcgcgctgtgcttttttgaaatcatgatacttcattatttctttataaacacctaaaaaaatgtttaaaatgaaggttaaaactataaatgttgctaaaacaatggtaagacctagttcttgaaaaaaaggttttcttgtagcaacagggatcttattgtatctgagtatttctaaataaataacaactgcagctagaattacaatggataaacttgcaactaaagaaatatatttaattaatcttgagaattgaaaagcaagaattttgtttcttgttaatctagctaattttttatctatgtagtctaatagctgttgttttataaggttcatagttatagtattttaccacatttgtgtattgaaaaaacctaaagaagaagcaaaaagaagctttttctttaggttttttaataaaatatttttttgtaaatttattaaaaataactttaattaatcaatttcgtgtaaacaaccttgtttgaaattgaagaaattatcaaatctttctcaattgtctttaaaagtggttttgaaattatgtaatctaatttttttgtcttcaaattcaaagcttttgataaaaatagtgattattcaaattattcaaaaggctaaaaagaaaataatgctaagaccaaagagttgatatggtcattgtgaaataactcctagtactgctaaacctttttttccaaagtagaatcagtttgcattgtaagcaatttgatattttatgttgtgagtagattcactaactgcgctaaaggttcaattaagtgtaaacattaaaattacacaaacaaagataataaatgcagattgtaatactactttgcttgtaattctaaatttattagattgcatcatttgtagtaaaaatggaaaaattaaaacgattaagtgtgtaattaaatattctcaaaataaataagaatcataacctcaatctatcccttgacgtgatcaagttattgttgagcctttgttatatgctagatcatctaaaatagtatcgttagttcttgaaatatcagcaaataatagagctaaaaatgcacctaaaaatgaaggaataacaaaaaagcgaatatactcaattttattaaagaataaaaccacaactacaaccaccatcatcaacctacacaaatgcagcggtaagtattctcatttgtaaatataatcataactttctaaaactacaactctacttactcaagaaaataagaaaatcgcaattgctacaaatttaaataaatatttaattatgattgggtgatcattgtaaaaatttctaattttaaatcttaaaatataaattaaaaataaaaccaaaaatgcaattgctactattagaaaaaatacaaccttactatctgcaaaatcaatttgatttcctcttcaattaaaagcatttgtattcatagtttccttctttttttgttttattataaaacaaatttaatttttattaacaacaatttgttttctatacttcaacaataaaaaaaggacaatttcttgcccttaagatagttctctgaaaactgaatagcaataatatttagtattaaaatatcttaagaatactaacattttaaatttttgaatatattagtattggtcagctgaatgtattactacacttacacttccaacctatcaacctcgtagtctacaaggaatttcataaggaatactcatctttgaggaagcttcccgcttagatgctttcagcggttatcttttccgtacttagctacccagctgtgcctttggcaagacaactggaacaccagcggtacgtccactccggtcctctcgtactaagagcagctctcatcaatattccaacgcccacatcagatagggaccgaactgtctcacgacgttctgaacccagctcacgtaccgctttaattggcgaacagccaaacccttggaaccgactccagctccaggatgcgatgagccgacatcgaggtgccaaaccttcccgtcgatgtgatctcttggggaagattagcctgttatccccggggtagcttttatccgttgagcgacggccattccacaatgtaccgccggatcactaagtcctgctttcgcacctgctcgacttgtaagtcttgcagtcaaccacacttttacctttgtgctctgcatatggtttctgaccatattgagtgtagctttgaacgcctccgttactttttaggaggcgaccgccccagtcaaactacccaccacgcactgtctccttcccagataaggggaacgggttagaaaatcaatttagcaagggtggtatttcaaggttgactccactagaactagcgtcccagcttcaaagtctcccacctatcctacacatgctaaaccaattttcaatacgaagttatagtaaagctccacggggtcttttcgtcttgatgcgggtaaccagcgttttcactggtaccataatttcaccgagtccaatgttgagacagtagggagatcattgcgcctttcgtgcaggtcaataattagttgacaaggaatttcgctaccttaggaccgttatagttacggccgccgttcacccgggcttcactttaatgctttgcgtaagctaacatctccgtttaaccttcgggcactgggcaggcttcaccctctatacgtcgttttacaacttagcagagagctgtgtttttgataaacagttgccccccctattttctgtggcctattaaaaataggcgccccttctcgcgaacttacggggttattttgcagagttccttaacattggttttctcgctcgccttagaatactcatcttgggaacgtgtgttcgttctcggtacaggttgataaaaaattaacactagaagcttttcttggaaacatgaaatcattcaattcgttactcgaccgaagtcttcactatgcatcacaactcaagattatgctatacggatttgcctatataactctcttgttgcttaccccacaatccagtaagtggtagaactatcctttttcgtcactccatcattcttttaccaagtacaggaatattaacctgttgtccatcgactatgcatttctgcctcatcttaggccctgactaaccctgggtggacgaaccttgcccaggaaacctttcccaataggcgtcgaagattctcacttcgaatcgttactcatgccggcattctcacttttaatctctccaccagtcctcacggtctgacttcaacgaaattaaaacgctctcctaacgcacataatgtgcccgtagcttcggtattgtgtttgagtcccgttacattattggcgcaagatctcttgactagtgagcaattacgcactctttaaaaggtggctgcttctaagccaacttcctagttgtttatgaaatctcacaacctttctcacttaacacaattttgggaccttagctgacgatctgggttgtttccctcgcgagcgtggacgttatcacccacgttccgactgcatagcttaattttaatggtattcggagtttgattatagtcagtacagctagatgccgccattccacattcagtgctctacccccattaaacaatactatacgctagccctaaagctatttcgaagagaaccagctatctccaggttcgattggaatttcaccgctatccacaagtcatccgggcactttttagcgtactacggttcggtcctccacttagttttacctaagcttcaacctgctcatagatagatcacctggtttcgggtatatgccaatatactaaagtcgccctattcagactcggtttccctacggctccgcttttttctgcttaaccttgcatattaacataactcgccggcccatactgcaagatgtacgccatcacactttaacgtgctctgactacttgtaagtaaatggtttcagaatctatttcactcccctctcggggttcttttcacctttccctcacggtactagttcactatcggtgtctgattagtatttagccttaccgggtggtcccggcagattcagacagggtttcacgtgccccaccctactcaggatacatctatgagattttatgatttcgtatacaggaatatcaccttctatgttgaagctttccaacttcttctactatcataaaattttgtaactcaatgtaagatgtcctacaacccctttttacaggtttgggctctttcgctttcgctcgccactactgacgaaatcattatttattttcttttcctgttgctactaagatgtttcaattcgcaacgtgtctcgctaatttgactatggattcatcaaaatgcaactgaggtttgctcagttaggttaccccattcggaaatctccgtatcatagtttatttccaactccacgaagcttatcgcaggtaatcgcgtccttcatcgactttcagacccaaggcatccaccaaatactcttacttaatttaaaagttaatacaactttaatattgcctattattgctaaagataaatatcttaaggtattttaatattggtaatctattttagaaatttaatttaaaaattaaactcggttataaaaaagatcgttgaaataataaatatgaagttaatcatattgttatttgctattcagttttcaaagaactataattgagaacttaaagctctcaaaactagacacgaatcaattatgtaataagtcaattaagactaatgtactccgtagaaaggaggtgttccatccccacgttctcgtagggataccttgttacgacttcaccccagtcatcagtcctgccttaggcaatggtctccgaagttaactcaccgactttgggcattaccaactcccatggtgtgacgggcggtgtgtacaaaacccgagaacgtattcaccgtagcgtagctgatctacgattactagcgattccgacttcatgaagtcgagttgcagacttcaatccgaactgagatcggttttttgagatttgctccatgtcaccatattgcttctctttgtaccgaccattgtagcacgtgtgttgccccactcgtaagaggcatgatgatttgacgtcgtccccaccttcctcctggttacccaggcagtatctctagagtccttaacttaatattagtaactaaagaaaagggttgcgctcgttgcaggacttaacctaacatctcacgacacgagctgacgacaaccatgcaccatctgtcattctgttaacctccactatatctctatagctttgcagaagatgtcaagagtgggtaaggttctacgcgtatcttcaaattaaaccacatgctccaccgcttgtgcgggttcccgtcaattcctttaagtttcactcttgcgagcatactactcaggcggatcatttaacgcgttagctgcgttagtgaaattattccaccaactaatgatcatcgtttacggcgtggactaccagggtatctaatcctgtttgctccccacgctttcgtcccttagtgtcaatatataaccagttagctgccttcgcctattggtgttcttcctaatatctacgcattccaccgcttcactaggaattccgctaacctctttataattctattttgccagtatccaaagcggactgaagttgagcttcagcatttaactccagacttagcaaaaaacctacggacgctttacgcccaataattccggataacgcttgcgacctatgtattaccgcggctgctggcacatagtttgccgtcgctttctaataaggtaccgtcaagataaaatcatttcctattctattttttcttcccttataacagcagtttacattccgaagaacttcatcctgcacgctgtgtcgctccatcaagctttcgctcattgtggaaaattccttactgctgcctcccgtaggagtctgggccgtatctcagtcccagtgtggccgtacagcctctcggcccggctaaacatcatcgtcttggtaggccattaccctaccaactaactaatgttccgcacccccatttttaagtgaagctgtgaagctcctttctattactcatcatgcgataaataactatatccggtattagctattgtttccaatagttatcccagtcttaaaggtaggttaggtacgtgttactcacccattcgctactgaatgtattgctacatcccgttcaacatgcatgtattaggcacacagcgagcgttcatcctgagctaggatcaaactctcaaaaaattgcgtgtttaataaattggttttgttttaattttagattcgtatctagttttgaaagatctaagtttcgtttctcttgcttcggttttaacgagcaactataagtatacactaaaaaaaattatttcaaaatattttttttttttttttttagttcaacttttggaaaaatcctacagttttttatattttttcctctgtaaaaagtaggtaaacaatattttaactaaaaaataaaaatctccaaatatttttttcattttttttaattgtgttttttctttatatttataatatagaaaaatgataaaaattagaaaaaaagtttaaaatttactctactttacaaattgaaaggaaaaaatgcaaattccttcttggctaagaatacttttaattgcttcaatttttgtttcattagctattggtgctgctgctttagtttgatctcaaaagaaaaaaaataaaatagttaaacaagtaatggaagaaaatagaaaaaacataaacaagagtttagtcatccctgaagctaaaatcgaagctgattatattgataaattgtttaatgtcaacaacaattgagtcattgaagaattagaatttatcattaatacaatttcgttaaataaattaaataataatgttttttttgaaaaagctggtgtttgtttttttctttcttcaattattaataaaactaataacttcatttttaaaagccacatcgataatcaggattttaaaaaacaagaacaacttttggaatttcaaaccccagaaactgcttttgttgaaaaaattggtcaagaaaaagatttttacttaatcgatggtattgaagataaagaaatagttgaaacattcgatttgtgttttaaatatttgaaaaaagatggattaatgattgttagaaatattagcaaaaaatcacaaactaaattaatcaaaatcttaaaatctgcttttattaagtatgaggtggatttaaatttttattctttaataattaaaaaatagtaaaattgtaatttgcaaaaaaaatacacaattatttaaagagaaaggactaatatgaatctaaaagataaaaaagaagaaatttttttaaccaaagagagtttagaatcctataaaaaagaactaaaccaactcattaatgttgaaagaaacaaagtaattgatgaaattaaatctgctagagaacaaggtgatctttcagaaaacgctgaatatgatgcagctagagaaaaacaaggaattattgaggctagaattttagaaattgaatctattttatccaaagcaaaacttattgaaaatacaggattaaaatcagatgaaattactataggttcaaaagtttctatccttaatttaaagacccaaacaagtcataatgtacaaattgttggttctttagatgctaatccttttcaaaataaaatctctaacctttctcctttagcttcagctttaattggaagaaaagcaggcgaagaagttgagattgatgtttcagaaaaatactcagtacaaattttaagcatcaacaatgactttagttaacaatgagttttttacgtagtataagagctttttttcctacagataaacatcaattaattcagttatcaaaagttacaattcctattgttttagcttcatttttaatttcaataaacaattttgttgacaactttatggttactggagttaaaaatggaattacagcacttggacttgctaatgcttgaacaggaataagtttttcttttattttaggagttaactttgtttctgctgttttatttggtcaatattttggtagtagaaacgtagaaaaatgtagagaaatcaacaatttacgatatattttaacgattagttttgtactatttttttgtattgcagcttggtcaaatcccgtagcaatgattaaggttgtctctggtaatcagtcagctgataataatcccaattatcaagatacacttaaccaggcttctttatatttaagagttattgctatatcttgattaattatttcttttaacttttcaactaacttaattttaagagaaatgaaacaactaaaaagtgctctgtttttcacatttttatctttagtaatcaacattacttttaacttaattttaattcctaaattaggatcagttggttctgcgatcgctactgttatagcaagagcagttgtttttatcactgtatatgtcttcattttcttcaaaaatagagactttatttttatcccttgaaaagcttttgtgatttcaaaaattatttgagttcagttttcaaaaagaataactggagctctactcacaacaggagggacaattgcaacttctgttcgtattttcatctgaccgcaaggctttccacaaggttctattggagttggtgaatgaaaagcagcttgaggcattggagttattacaatattagggataacaaacacaattatccaagctctaacttcttcattttcttcaattcaagcaaatatttctatctttgtaagtagattattaggtcaaaataaaattgatgaagcaacaagaaatgccaaggttttaaaagggtatttatttttatttgccgtcattttatctgctttattagctatttataatatttctattttacatattgattcctttgcccgtggaatagaacacggaatccaagaaacactacaacctgatgttacaaaagatcaggttgttggtgaatgagctcaaaaatttgcaaaagcttatcctgatgcaactcaattaaaaaatgaactaattaatcaacaatttttagctgcaaatttcttcaaacaccaagtcttttacagtggatgagtaattattgtatttaatccaatgtgaatgtgaatgctaacttcaattagaataattccagcaggtggaaaatctaatatttcttcaacttgagaatttgcttttggtgtaatgcaaactatttgattagttattgttgtatttttaattactcctaacatcaacataagtccagaagctaacttcccaatttccttcttaattttctacttgtctgatgtagtaaaattcgcagtttatgagattttatataataaaatagactgagctaaaaacattactaaaacagcttaaaaacactaaaaaatcttgaaaaatgaaacaaaaagacaattaatgataaaaaaacgctttttgtattcttcgagataactttttttagtaaaatttaaaaatactaaggagggaaaacatgaaaaagtgaagtaataaatcaattgcttttatttcaatttttgtttctattactgtcataatgctaattattagtgttagaatttttcctccttccattttaccaacatttaaatactctgttgttggtttgcctgttaaactgactggcttcatttttggaccaattgttgggtttttaactggagttttatcagatttaattacctttatgtttgttccttctctttattcaattttttatactttttatttaggggttactggatttataccaggaatcttcttttgaatttttatcaagcaagggaaaaaattttttgctaatgcaagtattattaaaagacacgaagataaaattgaagttttacaagctcagttaatttctgaaaatgatgaaactaaaagaaaaatgattgaacaaaaaatctcacttttacaaacaaaaatcaagaaaactgaagctcttaaatacaataaacattgacttaatttttcttgaatcacaaactcaatcattatttttattgttgtagtttgtattgcaactactatctattttattccagatgaaataatcaaaaaaaataaattcatcaacaagaaactttatggaattttacttgttgtttttggttctacttcaatgattatctttttattgtttgctaggttttttaaattttttattagaaatgaaatgtatttaagaatggctccaattgtagctttttctgctttacatgaacctttaggaaatattattattgcttttggtgatgttcaatcaggagttttagacagctttgaaacgtcattaataagccattttttaacttctccaattaaaatatgaataaacttaagtgtaatctatctaacttctagtattattattccaatggttaacaataaaagtttttattcatattaaattaggtgtttatgaaatcaaatgatgacttgcaaaaacttggcttatttttctttcaaataaacaataaaaattttgatcattttactttcaactttttaaaaggtgaagatactttaatttattcatctgatgaacaattatgaaataaatttaaacaaattctaactaaaagtgttaactataacggaatcattttcaacgacggagaaattcttgataatctcaaaaataaaaataaattttacttcaatttcctttctaaaaatgactttgaaaagtataaagattactctatttttaattttctaaaacaaagatttgcagcagaaactaactctgaatgtttaaaacaaaaatacattctagaaaaaaaatacttacaagaaaagcacattaattttgaactagcattttttgaacaacaaaattattccaaacttttaaatttaataatagaaaaattggataaagaaattgatgaaagttctttttctgaatctaatttcttatacgttcttaaaaaaatctgaattcttatttgacaatttaaatcgagttattttcaatattatcaagaaaaaattgatgatttaatcaaatttgaaaaaccttatttaaattttatttctaaattagacaaaaatttagtatctcttaattctgttgttgatatttattatttagaacattataaacacaataatatcctcaaaaatcctaataataatgaattagataatgaacttgaatcaaaaactttaaaatacagattcattagtaaatgaataaagaaaaagaaggttttaaagaaaaaaaatactatttattatttcttaaaaaaactaataattagtgacataaaagaagcatctcaagatgcaagatttgataaaaataaattaattaaagtttattttattttaaataaaaagtttttaaaactatgaaaatataagtttatttttaattcaaaaaatagttttgatttaataactttttatgattattgatacagttgacttcatactaattttgcaaaaattgttgacaatccaaaatccgataaaactcgatgagttaaaagtttttttaatgttaatttcaaaacaagttattgaagttataaaacttttttagctaatttacttgataaattttcgcaatgaaaaatcaaaaataaagaaaaacgcgaacttgaaaatcaaatcgcaaagcaaaaagaagaaattcgtgaaaaatttcaaaattcacacacttattgaacttacttaaattctttatacgaacaaaaatctacacaaaactgaattaaagattcaatgattaaaaatttcaaacttcattctagtattagagaagaaaatgaagacaaattaaaaagaattaaaaaaattctttttgaacttgtaaaaaaacatactgatacttttgctgacttagaattcattaactctttttgtaaagaaactttcgaaaatattcaaaacagggaaattaaatcaagtcataaaaacaacattttaaataataaatatttttataatttcattttagaaaaagaaataattagtttttgtgaaaaaaataatttcaatcatggtgttttatttaaaaaatacaaagaactaaacgaagaacaaaaaattaatcttgaatgctcaatttctcaatgatttcattatgaattttacttcctaaatacttcaaatttctactttgaacccaattcatttattgatcattttttaagatttaaaaaacaaaatcaatctctaataattttttctaacaaattcttaaaaccacaatttctcaatttcttgtttatagaaaaaaataaaattattgaatcttttgtaaacaatgattacaaacctgaatttgaaaccacttttgctaattacttttttaatcatcatgattttgatcttgatttattaaaagatttaccgactaaaaaatatgatgagttttattatcaaaacgttgaattcagtggatttaataaaataaaaaatatttgagaagagtgatctgataaaattcaagaagaaaaatctcagacaattttaaatctacaaaagactttagaaaagggcgattatcctattgcagaagatgatatttttatcagtgacattaaaattcaaaaaccaaaattagatataaatttaaaggaaaaaaatggaaaataaatacaatcattcatttgtcgaaaagaacattaaccaaaaatggattgataaaaaattttttgttgcaaatagaaatccaaaaaaacctttttcaataattttacctcctccaaatgtaacaggaaaattacatcttggtcatgcttgagatagttatttacaggacacaatcatcagatttaaaaaattaaaaggttatgatgttttatttcttccagcagtagatcatgcaggaattgcaactcaagcaaaagtagaagaaaaacttcttaaacaaaacatcaaaaaagaggatttgggtagacaaaaatttttagaaaaagtgttcgaatgaaaagatgaatattatcaaaatatcaaagaacaatgatttaaattaggtcttggttttgattacacaaaagaaagatttactttagatccacaagcacaagaagctgttagtgatgtatttgttactttgtacaaaaaaggcttcatttataaagcaaatcgtgcaattaattgagatgttaaactaaaaacagctctttcaaatattgaagtaataaacaaaccagttgaacaaaaaatgtactatttaaagtactttatccaaaattccgatgagttcttaactgttgctaccactagaattgaaactatttcttgtgatgttgctttagctataaatccaaaggataaaaggtacttaaaatatgcaaacaaaaaagttgttcatccttttaccaacaagctaattccaattattttagatgaatatgtagatatcaattttggttctggagttatgaaagtttcttcacatagtatggctgattttgatattatgcaaaaacataatttaaatgctgttgaatgtatcgatatcaacggaaaactaacaagtcaagttgaaggatttaaaaacaaagatagaattgaagctagagatttaattgctaattatctaaaagaaaaagatctacttttaaaaacagaaaacattatttctaatgtaggattttcacaaagaagtgatgaagttgttgagattcttgttcaaccacaatgatttatttcaatgaaaaaacttgcacaaaatcttttagagcatttaaattcaaaagataaagttttattttatccttctaaatttagaaaaacaatgatttcttgaatggaaaatgttcacgattgaacaatttcccgtcaactttgatgaggacacagaattcctgtttgatataaaaatgaagaaattaaagttcaaaaacaaaaccctggtgcaggttgaattcaagacgaagatgttttagatacttgattttcttcaggtttaacaccttttgtatttttaggttggccacaaaaattagatattgttaaaaaatattatccaacaaatttattagtaacaggttgggatattatcttcttttgagtagctagaatgtattttttagcacttgaaatcacaaagaaaaaacctttcaatgctgttcttttacatggtttaattcgtgatatgaatggtaaaaaaatgtccaaatccttaggtaatggaattgatccaatggaagtgattgaagaatatggctccgatgttttaagagctactttaatttttaattcaactccaggacaagacattaaattcaatattgaaaaattaaatgctgcttgaagtttgaataacaaattatgaaatattgcaaaatatattaaatctttagaatctaaaaaaacaaaacaaaattttgtggatttatgaatcttaaataaattaactgttttaaacaaaacaatttccaaatatatgaataaatataatttttcattaatttctaaatctataaacgagtttgtttttgaagatttttcatcttgatatattgaattaaataaattacatcaaaatggatatcatttaagaaaggttcttaaaaaagttttaattgttctacatccttttattccatttttaactgattatttatttaaagaaatctttaacgaagagctacttgagcaaaaaagattaatgtttagaaattataaaaacacagaaaaaattgataaagttattgaaattgtttctgaacttagaaaatatcgtgaaaaacataatatttctaaaaaagaaaaattacaatattgaattaaaaataattctttagattctgattcattgaacttaatcaataaattagcaattgctgaaatctttgaaaataatgtttctattttaaaaaccaataatttcgaaattttcttaaatctttcagaatccaaacaaaatgaagaacaattaagaatagaaaaagaaattaaatatttagaatccgaagttcaaagatcttctgcaatcttgtcaaatcctaatttcttagcaaaagcacctaaagaaaaaattgaattagaaaaatctaaattagaagattataaaaacaaattaaattattatttatcaaagaaaaaataaaaaaaataaatttttgttttaaaatttatagcataaaaaaggaaaaaaatatgacaaaatacgtagtaagacacaataatgcatgagctgttaaaaacccacaagcagaaaaagttacaaaaacttttgcaacacaaaaagaagcaattgaatatgcaaaaagcttaaaaaaaacaacaagtgttatggtggaacaagttaacggacagtacagaaaggcataaaaaaatggcataaagccatttttttttttttttttagatttaattattaaaaaataattttatttttttaaaaaacaaaacttcttgaaagataataaattgcttctgataatgttggatgtgtataagttgatttttgtaaatcaaagattgttaaattatttttaactgccaaagcaatagtattaattaaattagaagcatcttctaaaaacataaagcaacctagaattcttcctgttgatttttctacattcatttttaaaaatgaaaattgtttttctaagttatctgcatgagctcttggaagtgaagaagcaggaatttcaactgaaacaaaatcaactccttctctttctaattgtttatcacttaaaccaacaccagcaacatcttgatttaagtaaattgctcatggagttgttgaaacatctaaagtttcttcattttcgaattctaaaatgtcttttgcaactatatcaccttgtttatatgcaattgaagaaagcatcattgaaccagttacatcaccaattgcataaacattttctaatgaagttttatttctgtgatcaactttaactgattgatttggatttaattctaagtttagatttttaaaggattctgtattagcaactcttccaactgcaattaaaactctacaaaatcctaaagtcatttgttcttcattttctattaaaactgtgtttgcatctgtgaatttaacaacttttgaattttcataaattttaatatttctttgttgtaaatattctttaacatttgattgtaattttgtatcaaagttacctaaaaattctcttgattcaacaattgaaacttcagaccctaaagcagagaaaagataagcaaattctaatgaaataggacctgcaccaattatcactagttttttaggagctttattaatatttaaaagatctgttgaatataataatcttccttcattttctactagttcttgtccttctatgttgatttttcttgaagaagaaccactagatagaacaagtttgtcaaaagtataatcttcttcgttaactcttgcattgttttgatctaaaattgtagcttcaccaaaaacaacttcaacacctgcattagttaaaccatttagtattgcgttgtttaatttttctttatttttctttcttcttgcttgaatttcaaaaaaattaaagtgcactttatgagtatgaactccaaattgtgaacttctttttacttcttcaaatactctagctgattttataagggttttagttggaatgcaaccttcatttacacaagtcccacctaaatcttgtctttcaaaaagtactacttttttgttgtttttaaccaataaaagtgctaatgaatatccacctggaccagctcctaaaacagcaatatcaaattttttaatctctttattcataatatagctattatactcttttcgttgctttatcgaaaaaaatgctaattttaatttttattcaaaaaaaaaaaaaaaaatagaacattatgaatgataactttaaagtaattacacaagattactcttcttatttatctactattaaagaagcgattaaaaaatttaaaactgtcgataaggttttgtttgtttggattggaacagttgtttcttctgtacttttttgaattttattttttgttggtttatttaaaggatggggaaacgtaaattatgccttaattataattgcattaattttagatatttttgcttttattgtttatattagagtaaaaataaatcaagaacgtataaagaaatttttaaattctttacattatatgcatgaagaaaaaacttcagaactagttgagacattaaatttaattaatacaagtattggaataaatgacttagcgatgtttcaaacaataagacaagaaactactgtattaaataatttaaaagaagatttttgatgttttttagaaggagttcccttattttttagaaaaaaacataaagaagttgttattaattttgtcgaatcagtagaatctacactttccaatatcaaccaacttaattatagacagtgagaacgtaataaacaatagggtgtaagtttaatttcattctttagtttattttatttcccaaacaaattttcttttttgtttgggttttttattttttaattcaattttcgtattctttttgacaatcttcaactactttttctatgtcagcttcattaaaaataatagcaccagaagctaattcgtgaccaccaccatttcatttgattgccacatttctaactactggtccattagatctaaattccactcttcagtttaaagtttcttcttgaacaaaggaaagtcaaattctaaattcatctatatttccaataatatttggtctagaagcactattagatgttttgtttaatttttgtaattccttttgatttaaaacaaaataaattacattttttgtcttttgaatttttgaataaatataagtttcaaactcaatttcttttaatgattttgcagttaaatgtgaatgaattaattttgtatcagttccgttttttcaaagtaatgaggctaaattaagtgttctggcagaagtatttgaatataaaaatcttcctgaatctgtatagattccaagataaattaaatttgctgctctttgatttatttttcattttgcatattttgctaaatcagcaatttgttcagcgcttgctatataagaagaatcaactcatttatatgttgaattcaaatcatcatcgtttggatggtgatcaattcttaaaatagctttaaatttgttttcattaaataaatttgcaaactcaattctttctttaaaattagcatcaacaactattgctagcgaatcttctaaaacatcttttgaaggtattgtatcgtgctctaaatgaagaaaattgaaggattttttagcatctccaacagcgaaaacctttttattaggaaagttaattttgattaattcctttaaaccaaattgtgatcccaaacaatctccatcaggtctaatatggtgaaaaatcacaatagaatcgaattgttgaattagttcaagtgtcttctttttattacctattttcatttttttcgtactcttccgctatctctactgcttcttgaactaattttttaatttcttttttgtttcttatatttgcgccagctgctaatgcatgccctccaccttgatatttgcttgctaaagtattaataacaggaccatttgaacgaagtcttactctaattaatttttcttcatctacaaagaaaatccaaactctgttgtccccgatatttgctagcatattaacagatgttgcttgctcttttgttaaattaaatttttctcgaatcttttgtgtcacatggaaataaataacttttccttcttttttatagttagaaagaacataagctaaaaaagctacttcattttcttctctttttgaaagtgctaagtggattttgttaaaatcaaaaccagaattaaacaaaaatgaagctactgaaaaagttcttgctgttgtagaaggaaagaaaaatctgtttgaatctgtgtaaagccctaaatatacatatgaagctatctcttcatcaatttctcatttatttttcatcaagaaataacctatcatttcagcagctgcaacaaaagaagaatcaactcaaatatggttgaattcaaaagaagaaacaacaggatgatgatcaattcttgcagtacatttaaatttattttcagctaataaataacttttttcgactctttcaggacctgctgtatcaacaatgatggctagtgaattctcaaagtatttttcttcaatttcttcttcatcaatgaatgtaaaattcataaattctaatactcctgatgcatttccgatgaagaatattttcttatccttgaatctttttctaatagccaaacctaaaccaaattgtgaacctaaacaatctccatcaggcctgatatgatgaaaaatgaagatattttcatgttctataatagcgttttcaatttttttatgtgttcctaatttcatttttgcctcttttatttatggtattttatgtttttttgaatacaaaaagctcgataaatttgttctagtaccaataatttaaatattttatgtgggaaagttagttttgaaaaacttattttttctaaattagtaatttcttgttctaatttttgttcatccactccattagaaccgccaattattaaagtaatatttgcttcatttgtgactgttttagaaaattctatagaatccggttgtcttgaatttatagtaaaaagaaaaacttttgaattttttggaatatttttaataatttctaaagtttctaaatgcttctttttatctatatttacttcttttttctcttttaaaataatgaaattaacactactaaagaattcaattctttttacaaatttagaataaattttcttcaaatcttcttcatcattattaaaatcaataatcgtaattttcatagctagtttgtgtttttagcttgtaattctttttccttttcaactcttaaataaaacaataacatttgaatatcagcaggattaacccctgaaattcttgaagcttgccctattgtatttggtcttattttcatcaatttatcaactgattcggaagaaagattatttacttttttataatcaatatttgcaggaatttttagtttttcaagtctaatcattttttgagcatcattattttgttttctaatatatccttctaatctagctataaccatgagttcatatgcgtattcaaaatctggtaaaacatctttgtaatcaacagttggacgagaaattaatttaagttttgaagttccatcacttacttcatatttctttcctaatttgtcttttggagaaacaaattctttagataatttatctatcattttgtcgatttttcgatatttttcaataattttttcatattcttttaaagaaatcatacctgtttttttagcatatttagccattctaatgtcagcattatcatttcttaaaataagtctgtattcagcacgagaagtcaacattctatatggttcttttgtaccttttgtaactaagtcatcaattaagactccgatgtatccatcgtttcgtaaaatctcaattggtcttctttttagaagcttttcttttgcatttataccagctactaaaccttgagctgctgcttcttcgtatccgcttgttccattcatttgtccagcaaaaaatagatttttaacttttttagactcaagacttcttttgagctctaaaggatttaaagcatcgtattcaattgcataacctcatttagctaccctagcgtttttaagtcctggaatagttctaattaacttatcttgaacatcaacaggcatcgaagttgacattccattaatatacataatatcttgcctttttgtttcgggttcgaaaaaaatttggtgtctttcttttgtgctaaatctaacaattttatcttcaattgaaggacaatatcttggaccaactccattaatagcacctgaatacattgaagatctatttagattttcattaataattttgtgagtttcttcgtttgtataagttaaaaaacaagaaatctgttttttaatattttgctttgtttttgaagaaaaactaatattaactaaaggcaaaacttctctttccacttgcgaaaaatcaattgaatcggaataaattcgtggcggggttcctgtttttaatctttgtaattcaaatcctaattcctttaaattatcagaaagtaaattcgaagttctttcattatcaggtccagatttgtattgttcttcacctcttaaaattttagaatctaaataagtccctgttgtaataatcaaagatttagttttaatcaatccaagtttttctaaataaattccactaatggctttgtttttaacttctaatttagttaccaaatcttctattaaagtaatgtttttgcgttgcttaatgtctttgagaattaattttgaatatttttctttatctatttgtgctctaatcgctttaactgctggaccttttgattcatttaaatatttaacttgaatcattgctaaatctgaaaaataaccttgaacaccaccaagagcatcaatttcacgagttattataccttttgcaggtccaccaattgatggattacatggcatagaagctaatttatgtttgtttaaagtaactaatgctacttttaaattttcagctttagaaagggcataaatagcttcaattccagcatgccctccacctactactatagcattaaaaaatagttgttttttattcataaatcattatctcttttctttttctatcttgaaaagtttatttgttaattcaatgatatctccgggataaagatttttacctctagcttttgtaactgtaccgttgatttttacttcattttttaataaaaaatatttactttgtccacctgaatcaacgatgtcgattttttttaaaaattgactcaattttatactttcacctttaattctgattatcattatttccttattttaaaatgtaattaaaccaataagttgtttatttttcttatttgattgtgaattaatcaaaagttttgttttattagctgttatgaaaaaattgatcttgtcttcaaaaacattgattgcatcctttaaaaacttgtagtttactttaaatgttaaagttggaccactaaaaacgtgattttttgttttgattattgagttacctttttcatcttcattaaattgtactgataattcatcttctgtgatgttaaaaattaaagtattgtgtttttcagatgaagaaattattgttgctttcgaagtgatttctattaattcttttttttctatttgaaaataatattgaatatcatctttttttggaaacactgatcttatatctttgtatgtttctttaaaaagaacgctttgaactgttgtgttttcaaaagtatagctaatttttcaatcatcaataaagagttcgatatcttcttttgcctcttctaaaacaaaatcttttaaattcttgtttttaatagcgatatctagttcaattggattttctatattaattgtttccatcgcaattcttatacgatctgaagctgaaatttctagatagctgtctcttgtttttaaacttaaacaagtaaataataaataattatttttttcttttgtattttctttacttgtgtagcaagcaaaaatagtgttttttatagcttctcttaatttgcttgcgttgattattaatttttctcctctgtttttgaaatctaattctggaaactcatctacatcatttaatttaatagaaaattggtcaagtcctgatcttaaaatcattgtattgtcaacttgctctaaagaaatcttgttttttaatttttttaggatgtttttaaacatatttgcatttactaacaaacgccctagactattaatttctataaattcaaaattaggaataaaactttgaatagataattctctatctgttgaagtaattactaatccatctcttcttaattctaataataatcctcctaaagcagaatatccgtttgaatttgaaatagcaattaaatttctttcaacatatttttcaagtttttctttttcgattataaatttcatttttaaattcccttttaattaattatttattttatattactttattaaaaaataataacaataaagatgttaaaatgttaaaaactctaaaaaacaacgaaaaaagaaggattttcagttaaaaagtttttaacaatgaaaaagctaaaagttataaaaatttacctattttttcattaatcttttctattgcatacttaatcgcaggttctttctctttcctaacattaattttgttgataactgaaataattgtggaatgatccttgcctccaaaaatctggccaatgcttttcaaagttaaatctaacaagtttttaacaaaccaaattgatatatctctagccataacaatttctgtttttcttgaagtcccaatgatttcttctttgtttatttgaaaataattagcaacttcttctattattttgttatgtgttaagttttctttatttttaacaatacctttgaagatcctctctataagttctaatgaataaatttgaatggcttctccttctgaaaaaaatttaattctattaactacaccttcgatttctctaactgattttttgttataaactaaaaaatctaaagcatctttttcaaatttttcaggatttatattttgaaatttaagtttatattttaaaacctttaaaaaatcttcttttgtaggtttagaaaactctaaaattaatccagaattaaaacgagtaataaacctttcttcaaaaccacctaagacttctggagatttatccgaagtaatgatgatttgtttatcattttcaatgaaattgttcacaatttgaagtaaaacagacattgttgaagtcttattagctaaaagttgaatttcatcaaataataaaacatctgcataacaaactgtttccacaaaatgattaatatctatattttcttttttaatcattcaattagtaattaatgttgtaaaagcgcttgaatgaatgtaataaactgtcttcttccttttgataaactcatttccaattgcatgtaaaaagtgagtctttccaatacctgaagaaccatataaaaataaaggagaataaattatagtttctgcttcgataatattttcataagctttgattatgtttttattaaaattagcaagtacaaaatttccaaaattatatttgttagttaaaatgttgttaaacttaacattttctttatgttctgaagctttttgtgttgaatttgaagaatgatcttcaatttttgaaactttttcagtttcattttgcttttggaaattaacttcatctgaagtagttaaagaaattatttttttaattccagtaacttcgaaaactgctctttctaataaatgcattcatttatcttcgatttcttttttagtaaaattattttcaacttttaaaattatttcaacactggattcaaataagactttaatttttctaaaaaaactattgaaaattatttgatcatcaacagaagtttcaaaataattcactaacaaaagagttgtatttttattatcaatcgtttctaaaaaaatttcattatcatttttcttcataatatttaaattataattataaagcaaagagaatctataatttcaaattaaaatttggtaaaattttctcttatctaataataaataccattattttgtggtattatttaaattcatcatattaagaaactattaaaaggaactaaaatgaaaagaacataccaaccaaataaattaaaacacgttaaaactcatggttttagagctagaatggaaacagcagatggtagaaaagttttagcagcaagaagagcaaaaggtagaaaaagattaacagtatcagataaataatgttaaattttaaaaaagttcgaaaaaactgacaattccaaaatataatcaattttaaacaacaaatagttaataaagaacttattttatactacaaagaattctttcaatttgaattaggaatctcgattccgaaaaaatttgtcaatgctgtaaaaagaaattattacaagagacaaattaaaattattattcaaaattatctaaaaaataaaaaagaatttaatgttaaattccaaataatacttataacaagaaaaagttttttaaacttggattttaaaacgaaagaaataaaaataaaaaatattttgaatgaattagaaaacatatgaaacaaaagaaagtaagagctagtgcctacgattatttcaaaggaaatactcaaggcgaagataaaaataaacaaatctttaaaagagcactaaaaattttaaagataattttttatttctgtatttttggaattactcttacagggtgtattcagtcttttgttattaaaacttcaacatcttcaggttctggaacagaattttataaaaataaagaagacattattccaaattacacaatttttgaagctacaaataaagcaggtaaaaacgaaattaccaaagcaacaaaaagtaataattatttaatttctgaaaaagatgctccagttttaaagcaattaagagtacaaacagaagcaaatggaaatacttcaaacaattacggtcaatatagttccttgattatgtttcataatgcagataatacttttgagtatgctaaaggagataaaacccacgaatttttatttttaaattcagcagaatctaagtatgatcctaaatttaattgaacagatattaaattaccatctcctaagttttttgccctagttggtgataaatacgcagaagaatttcaaaaaacacaattagcagtaaaccctatcttacaaaatcaaggaaatttcttctatacagtctctaatcaagctgatccaacaaatgaaaaatactttaatttttcaagagatattattcaatatctttataataaaactatgaatattgaagggtttaaaaccaaacttataccttcaataaatgtattagaatcctataaaaatgaagcagattttgaaaaaatcaaaaaagaattacaagcaagtaatgatcctgttaaaaaagaagcattacaagttttacaagattattcaactctagctaaaacagttttaatcccaactagatttacacaaattgatccagttaataacacttattcctttgcttacaatctaaatgataatgattattacaactatgaaggaattgcgtttagatctgattatccaaacaatccaattgttacttgatcagattcttgaaaactaggtcctttttattctttaattgttttcccattatctaaaataattttaggagtgtctgaatcacaatcaatttgggaattaaatggttgaacaacaatatttgctattatcgtagttgttttattgacaaaaattatttcctttatttttagatttaaaacaatatttggtcaatcaaaacaaattgaaatgcaggctaaaaaagcaaaaattgatgccaaatacgaaccatataagaaaaacaaaatgatgcagcaaagacatagacaagaggttgctgatctttataaaaagaacaatttctcaccttttgctccgttctctcaagttttagtaactatgcctatcttcatagctgtttgacgggtaattcaaggtattccaagtttaaaagttacttactgagttggtttagaattagcttcaatttcctatcagaagttattcgaaggtttatgacaatacctaccgattttgatcattgttgttttagttcaagctgtacaacagctacttcctaaatatttaaataagaaaaatactaatcgaattatgaatcaaaatgaatccgaaacgatgaaaaaacaacaaaaaacgcaaagaattatttctattgtttttatcttctttggagttctattccaagcttcgctacaaatttattgaatcattggtggtctatgagaaataggtcaaactttaggagttcattatcttcaaagatcagccttctttaaagaaaaaatgagaccttgactgattcaaaaaaaacttttataagtttaaaaaatccgtttaaaagtagtaaaatataattagggcgaagacggaagttgaggcgtcttcttttcttgaaaaaggcggggttttcaagttatatgttaatagataaaatggccctcttaataaaattatttctgtttttttaattatttcatttaaattacttttttaacagaattattgtttattaatcatcttgatcatctataaactataattatttaattaaaaattgttaaataattcctcctattttatttttattttttacattattttttaaattgttttttttattattttttttaaaactcaagatgtatttttgctgccagcaatggcaaacattacaaataataatataactggtcttaatacagttatgtgacctcctaacccattttgtttataattttattaatttattatatttgccatttatctaagtcgtattgatatcaggtcagtacgattttttattcttttttttctttttttaatatgttaatttataatatttagaaacactatttagaactatttaaaaagagataatatgagcaaaattgattcattaaaaacaagttttgacactaagacttttgtttttgaaatcttagctagttttttactaattttgtttgttttactttcttattattctttttttaaaagcaagaaaaataaaaatctttatcttttttcaattattttaaccttttcatttttcttaactatatttttaactttaggaattgcaggttttgcagcaaatcggccaattaatacttttttattgccccaattagttatttctgatgcttttattttgggcatacaaaaggattttcaaggagcaattttatcaaaaggaattgcttatttattaactgcgcaattactaggtgttttattagctattttagtattttatgctttatttaaagctctagaaaaaatgcaaaccacagaagaagatcgaaaattttcttttcaagaatttttgtttataaaagaagaaaaaatacttgtttttacctttaaagaactctttttcatcacaactatgactttaggccttattactatcccaaggataagtggtgcagccaattttacattttttaatatactaattattgaaattattttcatcttctttttacttcttctttcagctagatttggcttttttacttttactttttttaaatattgattagatttagttattttttcaatcataagttgaaaaaataaaactttagtacaaaataaatctttaatcattaatgttttaattcaaaatacaattagaacattgattagcgttgtagcaccgattgtaatttcgctaattttattaagcatttctgcaagttctaatctcacttttaaatttacataagataggaattatttatgaacaaactaaaattatttaagtcttttgctttgattcttactccagcagttgcactttcttcttttatttcctgtttttcaacagattcaacaaatgtaacaaacaactttttagactctacacaaaaaggaaattctatttatatcccacaataccagttaggtacttttttagaacaaaaactagatcaatttgttaatgttagttatattcaaaacaatgtgttagaccaatctgaggttttaatttctaatttcaaaaaaaacttattacctcataaatatttacaaattaatgtagatcaatttaaattaattaatgcagtaaataaattaaatgacacattagcacaaaataaaaaaataaacattaacaatttttcatacgaaattgaatactctcaagtaaaagaaaatgatcgggacacatctgttttagatgttccggttaatattagatattttgatccttcagaaaataacaaatgaaaacgtgagcaagattttgttgttatcaaacaagtaccaggatttaaaatagatgaagaaaaacaaaaacttataaataaagttttaaaattagatatgcaaagcaacaaagaaaatgcacaaaaatttgattttaatgacaaatcaaaatattcaacactttcctttgttaaattactaagatccaaagaaaaaatttcatacaaagaatctttggttcctgaagaacaaacaaaagacaaaactttagaaaaaaccaaattcctagataaaaatattcaagatattttcttagttgatcaaaatggtaaaaaagatttgatttttaatttaccaacaattgatgaaggggtaaattattatctaaaagatgtcaaagtagcagatgacgatttttctaaaatagaaattacattaagaggtgtagctgttggtgaaaaaaataattttgcttctttagatcttcatttcactattgcttcagataacaataacaaatttaaaaacttaacagatgaagaatttttagaactaagtaaagaaaaattaaatgttagattaaaaaatcatctttcatttattaattatccttgagataaagcaaatgtaaatgattttgaaataacaagcaaaaattcaaaatacaatgcttcaattgtgcaagtgttagaaaaatctcaagaaacaagaagtgctaaattagcaattaaatttactaataataaacaaaatccatcacaagagccaatttattttgcaaaaactgttggtttaccaaaacatcttgaactttttaatagagaagattcagcaacagctgaaaaactaaacaaaccagaaagagttcacttgacaattcctgaattaccaagagaaaatctattacaaatcacaaattcagtaaatgaattagcaaattcctttgcaactccaggtggttatcaagaatttagaaccttttacacaaatactaattttacagctgctttacacataggtgaagatgttttagtggatgcaggaatgattttaaaaacctttgccaaatccaaaattattagtgcttatgctttagaaacaaatgttccaggatcaggaattggagcacaagtagcgatggaagtacaagtaaaagatcttgatattgaccaaagcataaaagacaatcaactaagaaatgttgattcattaatattcttctttatccacttagatccttcatttttaagccaattaggaactgttactacagaaaccatatctaatagaaaatatcaaatagttaaaaatattactcctcaaacaccaaaatacttagcaaaaggtcaaccatttgcaaaaattggtacaacagaggtaaatggtggttgaacacctcatacacatattgaggtctatccagtttattacgaagtaaaagatggtaaaaaacaagaagtagatacatttttaaattgagattacattccagttaaatttagttctttaagagtatcatctcaaagatttaaagattatgataaaaatccaagcagtgtaaaagtagttggagtaaaaacatcaacagcaagacgtgttgcaactgaattcaacaaagacggaacagcaaaatcgaaaccaagttcaacaattttagatagagattatataaacaacatacgtgaagaatttaataaacttcaagctttaaatccaaactgaatcttccaatttagaactaataatcaatccacagtaagattagaatctttatattcagaagcaaataaataaaacaaactaattaaagagatgttatgaaatcaatatttattaaaaaacttctttttctatcagtaagtacaataactttagtctcaagtgttttaatttcttgtcaagaaaatagccaaactacaaccaaaaatcagcaaactacttcttctcaaaaaccttctcaaaatagttctaaatcttcacaagcaaacattattaaagagttaacaactttaaataaaaatgttgttgataatgaactaaaaccaattcttaacgaaaaccttggtatcatcacgcaattagctattccttctttatcctatatactaaaagattctctgcaactaaaagataataattcagattctgaaaacaataatgaatctgatttgaacaaaactttagcagagtttgtagttaatccaaaaatattgagtttgttgcctaaaatattacaaattcaaaatgattattcttcaaaattaaaggatttagaaaaagaagcagctttaactaatgaaaatttccaacagattttaaaagaacaaactcaaaagaaaattgaagtaattattacaaaactttcaaactctgactttaaagctcaagatttgccaaatgatgcttcaactataaattcacaacaagattttgaattagcaattgaaaattatgttacttattctttagtaacacttttaaacaaaaataaacaaaatattgaagaagaagtgggtaacagccaaggtacaaatataattgattcatcaattttaaaaatttataaagatctagcttatcaattaacttcgcaattaaaaaatcctttaccatttattatttcttattttaaaaagttatatcctaatccaacagctactgatgtcgataaattcacaaaagaagttttagcaaaaactttcgaaaacacagtaaacaaattcttagttttactagatgtttaaaaaacaataaattttttacaaaatcctataaatttataggattttttatttttttcacaaaattagccaattttttcaaaaaaaagtacaatttaaaaacaaagaattttttgttgtcaaaaaaacacagatttttaaaaatttttacatacaaaaaatcaactcaactataactaatttttaaacaaatttataaaggaaattataaaaattaaaagattttattttcttcactctcttttgtgtctcttttttcaggaatattagcaatttcttgtggtcaaaccacaactactgttcaacaatctcaaactccaaaaatagaaaccacacaatctcgaaagcaacaaactccaagtacaactactgcaccacaaactaacaacaatactacaaataatgaagatgattcaacaaacaacaaagtagaagaacaagaagctcaaactccagatgaagaatcacaagatgaaaaagctttagtacaacaatcattttctagtcaagaagaagaaatagaaaaagaaataatacaagcatataaaacacaatttattccaaatatatctgctatgactcaaaattattgaataattattaaagcttatatagaaaaaacaaaagaaaaatttaaaaacaataataaagatatttctgattccgttcaagattccgatctacataataatggatatacagaagcaaaaaaataaattaagtgaatttaaaactaaattagaagaattacaagccaaagctataaaagaaagcgtagatttcttaccaattttaaaaaaagttttaatttcaaatttattaaaattatcaactgaatttaataaagaaagagataaatttgaaaaaaatttacctgataaaaaagatattaaaacaaaagaaaatttaaatacacacttatcttcatatactaaatacacaatgtttaatttagaaattgaattgataaataaagcaagacaaaaaattacaaaaattaaatctttagatgaactcagatctttttcactagaaatattaaaaacagtagctaaaagcttcacaaagccattgattttaattggaacaagactaaaccaacttaaaaaaacaattgattttaatgttcaagaagtaattgtaaataatgttaaagaagcttcaacatatgttggtactaaaataaaagaaatagtatccagtaaataaattaaataataatttattaatataaatcatatacatataaaaaaatagataaattgctttatctatttttttataaaacttattttatcatcctcaaaaacagtatcaattattaaatagtcttgattttctgaaggattgttcaagtggttttgaatatcattatgaatacaaaataaataattacttaaaatatctacaaaaatactttgaaaacaagcaattaaacctctagctcccaaggatttatcataaatttgattgattttaaaaattaaagtttttcattgttcatcatttagttcgcttaatttgatgtttttttcacgtttaagtcaattatttagttgattaaatttagaagtaataatatcttttttaatttgattatcacttataaaattaaaaggaacaatatttttaacaccaattctgtttaggatttcaggtctttttagttctttattaaagtgattttcaacagctttggtaaaagttcttcttgtttcttcatcagatgaatcactaccttgttttcctacttcgctaacccctaaattggaagtaaaaataataaaggtttctgaaaaatcaactaattctccttttgatgaagtaagacgcccgtcttctaaaatttgtaaaaatttatccaaaattcttccatgtgctttttcgatttcgtcaaacaaaactatagaaaaaggcttctcttttatagcatttgtaagttgaccacctgcttcgtgaccctcataaccaggaggagcaccaattaatttttgatcactatgttctaagttatattctgacatatcaaaacgaattaaatgattttcactaccaaaaataaattcagcaagtgctttagaaatttcagttttacctgtacctgttggaccagtaaaaaacaaaattcctttaggttttttctttgtatctaaagaatttaaatctgataaaccaacaaaagatcttattaaagtttctttaattttcttgatagcaaattcttacccttttacccttttactaattgttgtttcaaaattttctaattgtgacggagaaatcttttctcattcagattgttttttattgaaaaatatagtagtgtataaagacttgaaattttcaaatttagaaatctgagaaacttttaaaagttgaataagttccctaaaagataaatcatttgtaagagaaataacttcatcaaattgagaagtttttacttttataggttcagttaaatttttattaaattcatcttttaaaataatttcaaaaattttctttctttcttcgctgtccggttttgctatagaaatgaagttaatttcaggatttttgttgtaaatgacattgtttaaatcatctttgtttttgcaaataaaaatcagtttaaagtttgactttttaacaccagcaacattgtgttctaaattatcaataaaagttttgattaaaccaactaaaacactacttgtaacgctttgatcaccgttttgagttagtaagtctcctcaatcgattatataaactcttttcttctctttttcatttactaaatcatttttgtaagcatttacttcttcaattatagagttaataaatacagcgattggtggtatttcattgccaggattttctaattcttcggataaaagatcatcctcattttcataaccttgctcttccacaggttcgttttcttctttgttgttaattaattcctcgaggtttctgtttaaatttgtaattcctgtactaggtgaaaagtatttaatagttttgtaatttaattctctgaaaactaaagacaaaaacttaggtaaatctataaaaaaactagttggtacttcgtttaaatctcttaaaacttcttcttttttaaagaaatttttaatatcactgataaaaatataatcaaaaatattttcagaaagaagcaaaatatttttttgagcagattttacaaaaatagattcgaatgctttataaaaactcattttttaccttgttcttgatttaacaacagaaactcttgttgctggtttatcagtttttaaatttctttttactttcatatcttgtatgctataaccgtttttcttgatatcttcgacaattttgtttgctgatttttcacaagcgtgaccaatgtaatttcccattttgtatgaaatttctagattaccatcaacaactacatctacataattgttgtttttgtttacaaacctaaatacttttctaataattcctttatcagaaagacttgtttttaatactttatttaaaacgaaaccttcagattcttttaaagacttagcaactacttttacttaagaattaattttttggatttcttcttttcttgtgtttattagataaactaaatctgaaatatcttcaaaattattgtattgtttaatgaaattttttaattcatatctaatttctgaagattcgttttcaagatttttatcaattcactcaaacctttgttttctaaaagaatttaatttttcttgatctacttctctttttaaaaattctgtgattgtactttctattaattcattggtaagtgccgaattagtagtttctaagtattcaattgcttcataatcaacgattccgtattgagtataaaactggaacacatttacttttgcgttttttgaaactctatctaaataggcattaatttccttgtttcaatctaaattagaaattcttttagataagctatggagttgttttaatcaatttaatctaatataatttctaattccttctcctttttgaaaggtatttcttaattcttttaattcgttgtaataattttctaaattttcttgaaaatttttgtcaaatgcatttacttcttttaaattttcaatttctcttagtaaagaatcacattttttaatttctggttcatttaaagttaaaaatgtagtttgtgacattttgtctcctttgattgttagttttaaagtttatttttttcttttacttttcttcaagttttcttcttttttcttcttcaattcgaaatgtatttattttattagtaatatgcttcaaatctctaaataataataaatattttctatattcttctatggtaaattttttgttttccacagatttatgagatatttcatttctccatctcctcaaatcttttaaaattctaccttcttcattagtaatggctttttgtttaactaaagcatcgatttcaatattaatattttcgattttactaccactcaaacaaatttccatttctgtgttaattttatttgctaaaaatgcatattcttttcctaaatcttgttgataaacatcagaaatatgtaatatttcattgctaagctctttgatttctgaaacatctacaaaagctttatttttagtacagaaagtttctacttcgttaataaaattattgaatttaataatttccatttcgcaattttttttgaaagaaaaatctgttcttgttgaagtttagaaatatctttatttttaaaagtgtaaacaatttcattaagtgaatttttaagttctttatatttgtcttttaaatcttcaacatgttttgttaaacttcaatattctaaaaaaggtaaattattgaaagtgattttttcaaaaataaagttctcaaaacaaaattcaaaaatcttattatttttataagataaggcattagttttttcatcttctattaaacgttgtttaatatttattcccttgttatctaaatgttttaaaaaatctttagcaatattttcgtttttacttcataaatcaaaaacatttcaatctttaaaaatatcttcaattttaaacaaagatgaaccaacaactcaattaaaccatttttcaaaaagttttggatttttagtagcttgagaataaaaaaactctcttacaaaatcaggaatttgtgtagattgatttaaatcaaacgcttcgatactgttaatcttattttttaaaaaatctagtacaatctcttttaaaatcaattgattttcttcattttgttcttcaaaattaacgtttacaaaatgaggagaaatttcaaattttatatttctattttcttcttgattattaatgataattaaatcttttttattagattcgaaaataaaatttaattctttcttttcatttcagtaaacattatttcaaccgagacgagacaaaacgttcattttgctttttaatttttcaatttgagaaggatttaataattgttttttaaatttgtctagtatatacgtctctatttttgcgcaagtatcaatattttttatagatttgaaaaacccatcaatttgtttttgaaaataatttgaagaatcaatttctggttgagaaagataattcacaataatttcgctcaattcatttgtaggttctcaagtatatacatcagaactatgataagcgaaggaaatattttgcattataaaatttatattttcgttatctaattctttttcaatagaaggtaaaacagtcttattattttttctatatgtttcaataatttctgaaattgcaatagctctttttcttcttttttctttgtgttcttctatatttacaacgtttttaacacattttcttagttcttcaagcaactctttattgtattcaatagcttggatatttcttccctctctatattctactgtgttatctaattcaggaatgacattaatgtatgcatatgttttacctctttgatttcttgcttcaaaagatttaaaaacatttttatcaaacaacttttttagatctttgtttaaagatagatcacctactaaaatatcatttaattcagtgtaatcaaaactaggattttgtagtattttttcatttaattctttttctcttaagttaacaatttgtctttgtattagctttacaagtaaaatttgaaaataaacaaacaacttttcttttatattgtatttttctttaaattcttcttttaatgttttatctaaattaatgcttttatccttgatttgcgcacccataaataatggataaaataaaaaattctaacttttctaattcaacatgttgtctataagtaaaatcaatttgatattctgctattggtattaaaaagtgttcaaaactaattttgctcatatcgttcctcggtgttaataatagtaaatttattttgttcaaaaacatttacgatttttcttaaaatttcagaatttatgctttggtaatatctaaatgcacccactaaaatgagtttatttcttgctcttgaaatagcaacatttattctttcattactatttaaaaaacttgtatttctttttttatcgctttttctcctattgaagaatttgaaacatcttctaatctatttttcgctcttataaaatcaatgataataatttctttctcacgaccttgaaagttatcgattgtgtcaacttttattcctttgaaaatttcatcctgagcaaaaatttgtttaattaaataactttgatttctagttaaacaaattacaccaatttctttttgaatgtttttataaatttgttttttgttattactttcgattatttttttaacaatctttttaataacttcagcattatactcatttactgtaccagtattttttgcttggaaattttctctaaaaataaaacttctttgatcaaaactttcagttgctgatttagaagatcgatgcaagttcaagataaaataagaagacatttttggaataggagcttttgcaggaatatttacatttttttctcttaatttttgaacataagaatcatttagataagaagtgtcaaaaattataggatttatagcatctaaattattgtgtgctcactcaaaagacataccttgaaagcccctaggttttgctggtaattctaatttttccatataatcgtaactaacattagctacatccataatttcttgtgaaaatctatgtgatgtttttaaaaactcatatgtactattattaaaattcaaattttttaactgattagcttgtgttttaaagaaagaatttttataaagttggtcaattttttctttaaatttctttttatcagggtcttttataagactactttcttcatcttcttcctcttcatcatcatattgattactttgtgaataggtttgaattggttgttcaggtagcccatcgtaaatttgatcaataatatttggttcaaattcactagaaggaggaagttgattgtaatctcctgaaaaaataactttttcagccaaaataattcttgcaaaaatttcaggagtagaagatttgaaatctcatcaataataacaacaccaattgggtattcagtaaataaatctttaggttctacgtcagcaacaccaacaccatttttatcagataaattaatttttgtacttgcagttgtagtgataccaataacgtttattaagttatattcaaaaacaaatttattaaaatcactttctaaataattattttgttcattggtattttcattataagttttgtataaatccttcaaaaatgaatcgtttcttgttgaatctttgttcaagattttattttttagttctttaaaatttttaacacctcaaacattaatgttgttatcttgcgcaagtttaaataaagcatctatcaaatttaaaacttgattatttttaactttatttttgtgtgtttctatgtaacatttgtttatagaatttatgttattgatatcgaaatcttcttttattaaatgctctttttcaaattcaaaaacagtatttttttctattctttcaattaatgtgtctagataagcgctaaatccaaaatattcttcaacattcaagtttgtttttacgattcatgcttcaatttctaaaattttttcttgtaaaacagaattttcttcttgtggattttctaatcaatgttcaattttagaaataaaattaggataaatttttgaagtttgaaaatcattgtttctttttgaattataatcaaatttaaagattatatagtttggattatttaaattattttcatttaaacgatccataaagttttctatagcttcatgtgtagaagaggtaattaaaatattttcaccacgtttaataaattcttcagccattgcacaaattgtttgtgtctttcccgttcctggaggtccttgtaaataaaatacatccctagaagctattgcttttttaacactatgttcttgtttttcgtttaagtgatattttcgttttgtactttcttctaactgtgtatttcttaaaagatctgagttaatagtttgtggattaaaaatcgaatgaaccatatatggattcttgtaaaatcctttgtatatgtttgcaaatgcacccaaatatcttctaattttagtaataaatcctgtttgattgtcattaagagtaaaaataatgttacttattttatcttttacaaaatcagaaattggataataatttaaaataaaatcatcgttatcttcatcttttttagtacttcattttatagtaacgtttttgtaaacactttttatacctttgagtttttttaaactttgtaatcttatattttttgaattaaaaatgttttcattaaattcaatacaattattaatgcttgaaatttcagattttaattgattttgaatacttaataatttatttaattctattttaaaatcgtttttagttttctgatttttctcttcaatttcttttttcttttgattattatttactataaatgtgtttgcttcatttaaaaaattctgtgtgttaaaattagaaaaaacactaatatcttggtcttcaaaagtatcaattattgtattataaatattttctaactctagaagtctttgttgtctttgtctgttttttttgttcaattttatattgatattgaatgtctgcatctctttgtctttgttcaaactctaaatcttcttccttttgaaatcttgtaatagttgtttgaataatcacccctttttctatattttctttttcttcgttgatttttaaatacttatttagtagttgattattattaatgattttgtcaattaaagatttatattgaatttgagtctcttcaaattccttattaatttttcttcttttttcttcattttctctatatttttcgcttaattctgacttttgtgctttgtaagatgcaatagtattttctaaggtgtcaatatctttttgtctatgagttaaatattcatctatagttagtttttgatttaagttatgaagtttaataggaaatgattttcctgttctttcatcatttaaaaataaatttctttttgtagctatatctgaagaataagaaaaaatagtgaatttctctttatcaatttcagaaatattaaagattttagatttattttcttccataaaaataaagtctttatcattatcttttattttgtctaaaaaaagcttttgagttaaatctaaaagttcatttcaacacaatttgctactatcttttggacaagcaaacaaaaaacgatcaattaaatcagatttataaatatctaaaattttaggaattttttcactaaaaaaattaacaaattcactatagttgcttggactaaaactagaaatattttcctgtgtccttagtaaaaactcaggtttgaaataagaattgtgcataggattatttaaatgagtaaaatttagtaatgaaattctgtttatagatataacaggaaattggataacaaaatgtaagtttgatacttcaatacactctatatcaaaaaataaagcagctgtatttttaccccactctttaataatttctttgtttttaccaataattacaaaaccatcaaattcaagttttttatttttttcttttttatcttttaattcattagcgaattttcttgcttttaaattaagtctgatcacttgatattcttctaaattagaaaaatccttcaaaaattggtgcagattatcttttatatttttaatttttggataaacattatcaaattcaccactctttttaagagcgctcaaaagtgttatgtccttttcgaaagcacctcaacttctttttgccactcctgatctaataggtttatctcagtgcttttcatcataaaaaaattttaatgtagttgccttgttttccttaaacgaaaaaaacgcaaaaagtaaaactttttgtgctaaattaaataaatattattttactgttatatatatatatatatatatataaattctctcttgtatcatcttcataaattatagtagttttgataagttaattataaagaaattattaatattttattaatttttttgtaataaaaaatattatttaaatgttgtaagttgtaaaataacctataaaaaaagactttttattttaaaagtctttttttataggttaagctaacaccttaattattgtttttcttacagtatctttgtttgtatcaaatctaggtccgtgagcttcatcagctaaaaataaagcaaactcatcttcttttaatttaataatattatcttcaaaattaagaatatcacctttataaaaacctacatcagtttgatctgaatattcttgttgagcggaagttaagtgatctttcgctaaatgaatgaatttttcagtgttatcacctgcaaaatgaatatcaatgtatttttgatgaagttcaaaaacaaagttttccctgtttaaagaagacattagtttattaacaaaaaatacttctttttcctttataggagtaatgccttcgggttgttttcttcaatcgttttcttctaatcatttaacaacaagttctaatcttggattaatttttgtatatttatgaaggtttttaattttgtctataatcatattaaattacacaagcctcgcattcatcgtagttttctgagtcttctaaaacctcttgtctaatacgtacataataaatagaaccacaaccttttttaaatgctctaatgtaagctttgtttaaatctctagtagttgctgtgtcttttaaaaataaagttaaagaaatggattggtcaatgtgtttttgagcttctgctgcaatgtcaataattggatcaggacctaattcatatgcacctaatgaatagaatttcatattttcttgattcattttgtaagcaggaacatatactctaccaatttttccttcttttctggtttcaacaggagcaactacaggttgtaggcttggtgtacaagaagaaaggtaagaaattgaacctgttggagcaacagccattagatgtgaattagcaataccaactcttttaatgttttcaactaattcaattcagtcttgttttgtcggaatagtaacttgatatttttcaaacacttctttaattttttgtgtctttggttgatattctttttcagatacttttgtatatttgtcaaaatatgaaccatcagcaaatttggattctttaaaatgttcaaaagcaccaaatttttgcgctagaatagaagaagatttaaatgcgtgatatgccattgtgtaaaagaaaatattggtaaaatcaagcgcttcttttgaatcatagtaaatgtgattagtagctaaaaaaccatgtaagttcatagcaccaagaccaacagcgtggtttttgttatttccattttcaatagaaggtgctgaagaaagatcagaggttctagaaacatgatccagagaaactattgcttgataaactaattcaccaaattcttttccactttccattgctttatcaatatttaatgaacctaaattacaacaaatatcttcaccttttttagtaaaagttaaatcaggaagatattcagaaggagttgaaggttgtacaatttctgaacataaattagacattactattctatttttatgtgcatttcttctattaactgtatcatcaaataaaatatatggataaccactttcaaaatgcaattctgctatagttgtaaagagtttacgtgcatttataaagttttttttaatgttaggattttcaagcattttgtaatattcttgagtgattgaaatatcagaaaaagcttttttgtattctctttcaacatcgtagacactaaataaagccatatctttgttatcttttgctaattcaaaagtaatatccgggataacaacaccaagtgagagtgatttaattctaattttttcatcagcattttctcttttagtatctagaaaacttaaaatatcagggtgatgcacatttagataaacagctccagcaccttgtctttgacctagttgattagcatatgaaaaagaatcttcaagtattttcataacaggaattacacctgttgcttgattttcgatttttttaattggtgcacccatttctcttaagttagaaagtaaaatagaaacaccaccacctcttttgctaagttgtaaagaagtagtaactgctctagaaatggattccatattatcttcaatccgaattaaataacaagaaacgtattcacctctattttttttaccagcgtttaaaaatgtaggagtagctggttgaaaacgacctagcattatttgtcttagaatgcttgaagctctttctgagttaccttttgctaaaaacaaagcatttaaaagagctctttcttgaaaatgttctaaatattcttgcgaatcattagatttaagagcataacttgaataaaatttaagagcccccataaaagaaggaaaatggtgtttatatttgtatgcttcttgagttagtttttcaagttcttcaaaagtgtattcattaattactttttcatcataataatcattttcaattaatcaagtaattctttctcttactgagttgaattttctatatctaggttcaatatgatgttttatataactatcagctgcttgttggtcaaatttataagattctttgtattttaagaataattttgacttagcgtttaaagtaatgtactcttctgaaacacttcctgttaaagtgttgttatctacttgttttttagtcataatacaaaccatttccttcttatattttttaaatttatctttattttgcttgatttttttattaaatggaaaaattaggaacttttatttcaaaatttcttaattatattttgaacatttattacatctgtttgagtacctaagagttcaaattgatatagtaaaggtacttgtaattttttagataagatggtgccagcgattgcaaatgtatcaccaaaatttgtattacctgaagcaataacaccacggcaaaattttctattagattcattgtttaaaaattgaattacttgtttaggaacagctcctgatgtttgatctccaccaccactgtatgttgggcaaaaaattacataatcacgattaacattaattttttcttccatttcaactggaattcttacgttatcaaaacctagtttttgaataaatctatgagtgttgttagaaatagatgaaaaataaactaaaaaaatttctccttctggttttttaattaatttttcatctacttcaataatatctttgtgcataatttaaaaatctcaatcttcgtcttctgtttcttcacttacacccataacataagatgaaccatttcctgaaaaaaagtcgtgattttcatctgctcttgctgaaagttggttgaaaatttcaggttctattcttgtttcttcttctgtaaatggagagtcataacctaggttttgtaagaattttcctgcattgtaaacactaaatttaatagcttcttctgcaagtcctacttctgaataaagttcatttaaataagttttttctaaatcaattaattcataaagtaagtcaaaaacaaattttttcatttcttcttgttttttaagaggtagtttttctactttcttttgatatttatatcctgaatagtagttgtgaataactttatctcttaaaattaatctgatgatatctgatgtgttaggaagttttgatctagcggataaataaaatggaagataaaaaccaccataaagtaaaaatcctggcatcatagctgctgcaactttagattttaaaggatcttttcctgtgtaatatggaattaatgcttgtgctctagcttgtaaactttttgtgttgattactcattcatgagcttcttctatttcttcactggtacataaagtggaaaaaattgttccataagatctagcgtgaacacctaccataaaagcaaagttagcataaattacttgttcatgatcggtttgtgaataaggaatctgagctacatctccaattgttgcttgaatagtgtctaaaagagttaaaccagtaaaagttctagtaataactctttttcatgttggacttagagttcttcaagtttctaaatcattggaaacaggaattttttcaggaagtcaaaaattttgaactactctgtttcacacttcaagatctttgttatcattaattacatttcaatttactgaacgcattttgccattgaatttgtttaatgcaaattctaatggtgatacagactctttgtaatatgcatttttttgctttttactagctgcttgcattttatttcctcctttttagctaaaaatatattaatttgtgaattataaacttttagtttagtgaatatatttcacaaattaataatgtttttaaatattaccaaaaaaaagatttttattgttaaaaaatatttaaaaaaagttaaaaaaataattttatacaaattttatttttctacccccaaatatatataataaaaaataactacttctaataaaggaatataaaaatgagacagtatttagagtttttaaggcacattttacaaaaaggaattaagaaaaccaatagaactatagtagatagtataaacacttttggttatcaaatgagatttgatttatctgaaggttttcctttagtaactactaaaaaaacaaattttgcttcaatagcacatgagttattatggtttattaaaggtgatactaatatcaaatatttagtcgataacaatgtaaatatttgaaatgaatgaccttatgaaaattataaaaaaagcaaagaatttcaaggagaaagcttaaaagaatttattgtaaaaattaaagaaaatccttcatttgcaaagcaattcggtgaactaggtccagtttatggtaaacaatgaagaaactttttaggcgtagatcaacttaaaaaagtaattcaagaaatcaaaacaaatcctaattcaagaagattaattgtttctgcttgaaatccattagaaattgatagtatgcttttaccaccttgtcatagtttattccaattttatgttgcaaacaataaactttcttgtcaactatatcaaagaagtgctgatgcatttttgggagttccttttaatattgcttcatattccttgctagtttttatgattgcacaagaatgtgaattagaagtaggtgagtttattcatacaattggtgatgctcatatttatgtaaatcacattgatcaagtaaatttgcaacttactagaataccacataaattaccaaaacttaagataacaaaaaaacctttttttgatattcaatttgaagatttacaattaatagattacgaacacgattcatttattaaaggagaagtagcagtataatgataatttcaatttgggcgatgacagaagatggtttaataggcaaagataattcaatgccttggcacataaaagaagaatttgcacattttagacaaacaacattagataaaactttattaatgggtaaaaacacatttttatctttacctaaaatttttgatagaagaaaaatgtatgtaattagtgatgatcctgagttcaaagtagaacatcctgaagttcatataatcaatgattattcttgattaatcaaagaatatcaaagaaatccagataaagatttgtatataacaggtggcttgatgatttacacagctttaatacctgaatcagatattttaatagtgtcgtttatcaaaggaaaatatgtaggaaatcgttatttaaaaaacataaattgagatctttttgatcttgtatacgaagaagataaaggaagttttgtggtaaaaacctttaagaaaaaagtaaaataaaagcttttatctttctttagttaaaacaagaatttttgagctttaattagaataattaaagttgtatttcatttgtgctctttgtagagttcttctaaaaaaaaaaaaaaaaaagcgaaatagtagtaaaatattgaagaattcaagggggttgcaatgaattttttaaagaaaacaaaaaaatttctcaaaaaatctaaaaaccaacaagtattatttttttttgtaactgtcttaagtgttccatctgttgttggaatcatttattatgttgcatcaaaaaacacagattctaaagaagatgtaaaaattttagataagctcaatgctaacagtgtaaccttacaatccatagaaaatgccgatactaataaggcattggatgctttaaacgacaaaaatttaaaacctaatcctaaacctgaagagaaaaaacctgatccagtgccaactcctccggttgtagttaatccgccaaaaaccccgccaaaaaccccaaaaccagaacctgctcctgaacctgaaacacctccagtagtagaaccagctccttcaatacaacaaacttttaaagatgatgaaacaggttatgttactttaaaatgagaaggacacgatgtaagagctttagttcgtaaaaaaccaaatagacaatattcaacctatgataaccaaaatggtctagctaacagaattccatatcaatcacaagtaatagatgaaattattaatattgaagtaactccagagatacaagcacaaaaccttaaaaatacagcaactgcattaaaaaactcagttcaaggttctgcttttagtatctatgcagatacaatttcacaaggtgataaagcagtggctgctgtagtggctcaaaattatgaaaattactacaaaaatatgttttctaaatgacagcaattatttgataatggagataaagttagagagtttttaacaaaagaggggtatgatttatatccaactatcaaacaaacatatgaaaatgatcttaaaaaagcaaaagaagcaatagaaaaagcaaatcaagagatggaacaattgcaacgagaacgtccaccaagaaatggctttgattcaaatggtcgagaaactttcacagatgaaaataaacttaaattagagaaatgacaagtcaaatataatgagcaaagtgataaagtaaaagcagctaaacaattagaacaagatgctaaaaatgttaaatatgcaaaacttatttattaccttgattatagtaaattagttaaaggttcaaaggaaaacgaagaatatctgaaaaaaggattcacaataaatccagataatactaatattactgttgatgctgatggaacattacattcttattcttgaagccctattttaaatcaagtaacatctttacttcaaagagacaatgaagaacgccgtgcctttggttattctagttattatggaagatcagggggtgacattttaaacggaacatatgaaggttgaactaaaacagatgttacaaatggagaagaatataaaaaatataacgtttctaaatcagatggaattaatatttcaaaactaactaaaaatgcagataacaaagcaaaaacaagcagaaatgaaggaatagttgtaactgtagatttttcaaatccttctggttatgaaagagttagaaaattaattaaagaattaacagcagatcataaagaaataacttcatatagatttttccacattggtaaaaatgatgctaatcagaaatttaaagacattttagctgagttaccaacaaaacttccacaactagaactcttgatggattctactaacacctcagctctactagctttagaaaataaacaaattgatgagctctctatttatacagaaggtaactcactttctgatgattgagcaataaatccatgagctttaaaaaatgtagcttgatataatacgaatgattacaatgtaagttttgattacgcgccaggagctaaagtagctacaagagtaacctttaattcacttgcttttgatgattccgattacacaggaggtcacgaaccaaaagattataaaagaattaatgatggtcttcgtatggcttactgaacaagaaataatgaaaaagtatttcaaggtggatgaggacctggacttcaaccagatgttaatgaatcagaaaattcatatccaactggtttagatttaacaagagttactaaaatgaaatcattaagaggattaaactttactgatactcaaaaatcctctaactcaaaaccaagaaaattaacaagaattggactatataacaatagtaatacatttgaaatcgatgttgatgaattaaataatgcacattttgatgttttagacacttcagttccaatggctcagccaaaaccaaaaatattcttttcaaatgatggtgcaaccaaaagaattaaagtagtggctaaaggttcagttcatactctaacatcaacaggtgcctctaatttaaatattcttttagaaaatggaagacaaaaacacgatgatactaaattgtttacaaatagatctattattgttgataaatcagattcacaattaataaattcattaaaaaatcaaggatttaatgttgatgagtcaggaacatcaagtttccatttcaactaggaggttattatgaaaaaaaatcgcaaatcaagaaatttactgttaaaaaatttactaatatcatcagcttttattatgccaatattggtagtgtcttgtagtgatacaagtaataatccagctaaatcagaaacaagttcacaatcatcagacaaaacaaatccagatacttctgatccaaatacaacaactccttcaattttgtttaatgcagataaaacaccaaaagaaatcacaactattaatttagaaaaattacctattattttaaaaagagtcgatcatttttcaaattattctaatttatctacaaactctataaatacaagtttagctgatttaaataaacaattagaatttgctacaacaaacaaagatgataatgatcaaattcaaatccaagtagaaaataaaaaatatttaaacaataatcctgaaacttcgcttgaacaaggtaaattaattttttcattaaaaatatcatctaaaaaaaatccaaatatttcaattacaaaagatgttgaagttggaggatttagacaatctagaagctcagaaattaatttgaactgagcaaatagatttgctccaggctcagaagatgagttcaaacaatattttgcagaaaataattatcaaagatacgaaactgatgcaaaaaaatatttccaagctttaaatggtcaactttcactaattgaaggaaaaagtccttttgatattaattcttgaagacctgacgtaaaaagaactccagaagaagttaaaaaatatgacgaactagcaaaacaacttaaactagatacatatgatgatgctctaaaaaaaggttttacaatgccagtttatgatgataaaggaaatgtagaaggactcaaactttatgatccagctgaaattcctaaaggtcctgcttgatgagatgtaattggtagaaatgaaaaccaaacaaatggacttgctagatatattccaaatgaaaaatataaacaagctgccttacaaacttattcaattcaattaagtcatccagcaagaatagatgaaattaatcctgatgaattaaaagcctttttagaaagccaaaaagaaggcaataatcgactgcaaaaaactgctcgtggaactatgtgaattttagattatgcaattccaactgatggtcaccagccaacaaaatgatattttggaacaaataatcacgtagttgaagagtataaaaaagatgctactggttttagcatgtcagtacttaaacctaatgttgctattagaacaaagctaagaacaacaaaaggtgcaaccgatgaatcttatatcacagcaagtttttctcgtgatgatttagtatctggtgcaaaaaatgatcacgctgacaaaacagcagattacatatcacctgcagattatggaattccaggtattagaatagtttatcgggcaacagattatttaaatacctctcctaaagattacctttctaaagtagatcaagaaaatgaaaaatacaaaaatgcagaagaatttttagattttgctgttcttgaaatagattttagtaaatttaaagtacctgatgggtacagttcaagagatgagtttattaaaacgataacaaatgattattatcataatacttcccaacacattaaattcttaaaaacctcatatttaaaagattattctagagctgatactcaattagcaaaagaagatacaagtaaaaaatcaaatactgatcaattctttattgttggttatccacaagcaactggggattatttcctagatcaatatcaagatgcatatgactataaaaacaataaaataggatattctctttgaatgaattcagaatcttctttttacaataatttaagcaatgatgaaaacaatgcaaatagtcctgaaaaccaaagagctaacaaaggaaattatttttctttaaacattggatatagaagttttgctgacaaaccaggattaacagatgcttttattgctacaccaaaagtaggaaaaaagcttcataaatcaacagttatgtctgatcctattcatactaaaaaagtcacaaaagaagtagaagaaaacggtaaaaaagtcacaaaagaattaggtgaacttcaagttgccaatacaaaaaattacatagcttttggacttgaatacttaccaagacattatgcacctgttggaggcgcttcaggatcatctatacgtaatcaaaacaatgaattagttggtgtttactttgcttctaatgaaacagccaaaacaggtttagctgttgcctttagatctgaaggttttgattacaaaggtttatatggtaaatataatttacctcaatatgacttaatttacggtggtggaaaagagcaaaaaacttcatttagacaagcattagaaaccatttatggtactaatttcaaaacctcattgtttaaaaatggagtaaatcaaattcctgacgattataaatttaaaaacaccgacataacaacaaacacaaatccttctacacaaaaaaagtagtaaattagcataaaacaaacaaaaacaagaaagattaaaatgatactttccaaaaaatctaaatcgagcacaactttagaacataaaaaaatttacgatgataatgaactgtttaaacacagagataacaaattaaatattattttaaaatattcaattttatctgttttgtttattttagtttttatctctttaatctttagtccaatcacattttttggtgtagattctaatactttaaagtttgtttgaatttatcaaaaagaccttcatatttctttaaactttttaaatatatgaaggtttttgatactttctttttgtattatttatcctctggtcaagaacttttttaatatctttttccaaaaggaattaattaaaaaatatacagttttcttttttatttatttggcgataagtcttagcagctttttcttatttgtgttttataatccagtttattatgatgtatttggtgaacaaagtgaaacacaaaatgccgcaatcatacattcatcttcaattttttatatttccattttattatcatttattgttttaaccaatactgcttatcatttgtttttattttacttcaaaagaaaaacagaaactctaaaatttaataaaaaaagtgttttaataattaatattgtttcacaatttatctttgtgattttgtttttaatatttatttacaatattacaaaaacacaaccagctaaatttgatgacacaggacaattaattgcaaatgaagaatacatagcaactcaaaattcttgatatttgtatattaaaaacctttttgaagcagataatataggaaatatatttataataattattttaatcatcttgatttctgtaatattttttggttcaaatttaataaaaattttctttgttttttctaaagaatataatagaacttactttaaaaatcaaattcaagtactctttgtaattttagctagttgttttctttgatatttgattattttaacaagactaggaaatttttcttcattaggaatatctacttttagtgctttacattttgttccttttgtaattgttttattagctattttagccgcgtatttgtttgtaaatctttattctaaaataaagattcaaggtaatggattcaatttagtaatgttcattgttagtcaattattaattgtttttattttcttgatagcaacattatttttaagtaatgagttaagtattagaattattttcttttttagttcattagtttcttgaataattactacattcttttttgttagaaataaaaaacctaaattagtatctatgctttttatttctacatatttaattttatttgcactagcaatagtgttgcaaggatgagaaatactattgctaagtgtatataactttgctactgtagcgtttacaccggctactcatttatctttaattcaaattatctttttaatacaagtagctttattattagctttaatggtatatacaattacagatgtagttgttgcaatgtttaaaattaataaaatgaaacaaccaattgataaaggggtaagtcatgaaaaataaaattttagaaatgttttcttcattttcttttaaaaagaagaaaaatgaagaaaaattagaaaaatccaatctgcaagaatatttagtttttgacaatcaaactaagattgaagttgttgatttatacaaaaattacaaacttaaaagacaaacaacacactttgtatcatatgatcagttatattcttatgttttattaaaaacacatcaaggatttcactcagagttatacaaaaaatacgaacaaaactataaaaatgctttagctaacaagcgtaatttagaatttagtaattttgttatttcttttaatttagatcttaaatactcacaaaaattattagtacctatagtgattactaaaggtacttctaatgatttagctatcaattttgtttcatctagtaatttacaagaacaaacattttttaatgttttaaatcaagaaattgtcaaactattaaatgcttataaaaccatagaaatctttccaggtcttttactttttaaaggaaatgatgcaattggttctttaaaaactctttttagtaaagactttatttcagtaattaaaaggtagaaaaatttatgcacttaaaaaaggttatacaaaaaagagataatttaaaaaagattcatttaaaagtaaatagtgaaaaaaatattttacttatttcaattattaaacttaatcaaacactaaatttttacgttgaaaatgttttattaaataaatatgcaattattaatttatctaataaatttcatattaaaaatgaatttattagtaaaggttttctaactaataataaatttttgaacaaattagaagacaaactttttgcacaaaaagagttatgaatttatttaaaagaagaacaaaaatactcaacagatagttattctagatatgaagatttaattttagaaaacaataaaaaaacaaaattagatttaatcactattggtgaaaaagcacaatcatttgctttaaaaaacaagctaaatctgataaaacactttgatattaaccaaaaaaacttttcaactattttagcttcagtaatcaagcttttatacatacataataattataaaaaagtaaaatttgttattaattctaataaaaatttaaacaatacttttactatcttaccaattgaagattttgatgtggatagaatgctaaattatgataaaaatacacatttaaataaattacacgaatttgcaatcattccagacattgattcttttatttctacatctattggaatttatctacaaaactgtgtacaagcaatggtcaatgaatcttcattttatgcagctaaaaatggtttagttaaagttaataaaattattaaagatttagatgaaactatcttaaaagtatcaagaaaaattattaaaatcaaacgtgaaaatgaaattgaggaaatagttttattaactaaaaataattcaagtcacactgtgtttgacaaaggagatcaatatgataaataaaaacatttttggtcttgaaattcactttttacacaatcaaacttatgaaagtagaaaagcagaagtttttattaatattgaagattcagatgagtgatttaagccaaatgccaaaactattggttcatatgaaagaatattaattcatgttaaggatttaattacaaaccaagatagatatttctttttaaaaaactgtaatattttggtaaaagatgaagaaattttcataaattcgcttaacagaaaaagagtttttagaaaatctacccacaaaaccatagattacaaaaaacaaattcaagaactcaaacaagatattttatacttaacttctttacaaaaaattggaattgaaataaatgaatatattaagttagaaagactagaagatgaatactatatctgaacattatctgacttattaaacttaaaggaggatgaaaatgagtaaaaaacgtattaaaagtctttttcttctttctttatcagtttcttcttttgttaccttttcaacaattttaagtgttgatcccgaaccagaaaatccaccagcaacaccgccagaaaaaccaaaagaaatttccaaggattttgacacattcaaagatcaagcaaattcagaatttaaaaaagctctaaaattttctattgaaaacacaattgataaattcacttcacaaataaatcaattaaatgagaataacagcatatcttttgaagaaagaatccaaaaacttaattatttttcacaagtaattcattttttaacttctaataaagataaaatactagaaaatcccgaacaatttggaatgaacgctgtatttttaaaagctctttctagaaacaaacaaaacaacaaaggaacaattacttttgaaggtaaagaatattctgatgttatctttggaaacgatgatgaaattagttataaaaatcaactctccgacaaagacaaagtagaaattaagaacaaaaatgaagacaattttgtaacaaaagaacaaatgcaaaaagtacttcaagattattcaaaaaaattatctacttcttttgcaggctttttatttgaaaaagatgaagatattcctaaattaaccaaagatgatttaaaacagattagcacaccaaatgaatctggatttacaattaaacctcctgctggttttaaaacttgagacgagtatttagaatccaaaataaaaaatagatatacaaaatttgacttagaacaaaacaaaccagtagatgaccaacaacaacctcaaactccaaaacctcctcaagtcacaccaacacctcctatcccagaagatccaacaaaatcaacaccggatgtatctaataaatcaccagtttacaaacctattgatcttatgacaagggttccgcctttaaaaccagaaattaaaggaaaatatattggaaaaacaatgtcagaaatcatagaagcttttaattctgataatgaaagtgatgaacaagcaaaatcagatgaatttttcttttttaataacccaattaacactagatacaaatatagtgttgttaaaatggaagaacaagctgatggaactaatcctgtagaaatcaaaattacagatttagtaaaaccagaagttagtcgtcgttataaattattaaatatttcaaacgataataaaacagaaggtttccaatatatttatgaaaaatatataaaagaagctcaagaactttttaaaaaattctacgttgctttaagtattggggaaagaatggaatttgaaaaaattcaagataattatttaaatacttctatctttaccttgctaacatcagctgtaaaaattgtttataatgaaaactttttaaaagatcaatcacaaattgtttcaacatatgcagactcagttgattcactaactagtccaaatattgatactccagttcgtttattattaactcaaattttaagcacactaaaaaattctgaagcaactattcaaatccaaaataaaatcaaagttgatttattccaattaataacagcaacaattgaagaaggaaattttggttatgacaatgctttaattagcattcaaagaagaatacaaagtaaacaaaatgcttttgtacttgaacaaattaaaagcaaatttaactattataatcaagatttttccatcgttgaaaaactttatgataaaactaaaaaagatgtatttttagctaaagcattagctagtcaaaaaacttttaattatattaattgatttaataaatttacacaattaataggtacgatcacaaaagaatataatctttgaaaagcgcttacttcaagcgacgataatgcttcaaaatatctctctactgcagaaagcacagctgaagatacttcaaacccaacaactcaaccatctaataacaattcatctgataatcaaacaatttcacaacaaaccaatgaacaaacttcagagcaaaataataatgataatacttcaaaaactgaagaaaaaacaagcgaaaacagagaagaattaagccctgaagaacaagcaactaaaaactttgcacaacaaattcaagaatacaaagacataatgtcagaatatcaaaaagaacacagtccaattatgtcgattagtggaataattacaacaattttatctcttattggtcttggttttgcttcattttttagattttttaacaaatttagcaaacataaaacaatttcaaaatcaatgactatacttataatttttaccgctttaattcttattatgggtatagtgctaatcgcactaggatttacaggaggcataatttaaaatgacaaaccctaaaattactgcaatatttgactatataatagaagtttctggagtttatccatataaacaaagacaattttttagcgttgttggcaagcccacagttaaaatgattttaatttctgctacagaaaataaagcatttttacttgctgatacaacagatttaaacaaattaaaaatcaatgacgaactcatagaattagacattcaaagcaacattggaacttcttctttattattttcaaaaatcattaatattgaagccaatccaatatttcctagaaaagaaatagtagctcaagacaatagagtaagatccaaaatttttggtgatgcacacaaactcttaactgttaaaacactaaacactcaactctacactggaattattccaattgatcttcttattcctattggtaaaggacaaagagaattaataattggtgatcgtcaaaccggaaaaacccacatagcaattaatgcaataattaatagtgcaaaagctggaattaaatgtatttatgtttcaattggacaaaaaagagaagaactttcttgaatttatgaaactctaaaagagcacggtgcattagctaataccattattatcgatgctccagcaactagtgcttatcagcaatatttagctccttacgttggtatggctcatgctgaaaacctttcttattcacatgatgttttaattatttttgatgatcttactaaacacgctaatatttttagagaaattgctttattaacagataaaccagtaggaaaagaagcgatgccaggagatatgttctttgctcattcttctttattagaaagatcaggaagctttgtaaatagaaaaacaattactgctttacctattattaaaacagtagatggagatatcacaagcttgattgcttcaaatgttatttcaattacagatggacaaattgttacaaatgctgatttattcgcaaatggtaaattaccagctattgatattgacttttcagtttctagaacaggatctcaagttcaaagcagaacaataactaaagtagcttcagaagtaggaaaaatttacaaagcctacaaaagacatttaaaacttgcaatgcttgattatgaactaaataaagaaacttctagcttgttatataaaggaaaaatggttgaaaaaatgtttaatcaaagaggcttttctttatattcacaacgttttgtacttctgatgtctaaaataataatgtgaggacttttaagacatgtgcaagaagaacaaaaagctatggaatttattgatgcttttattgagttaaatgaagatgctaaaaaatcctttacgcaaattttaaataatgaaccatatgatgaagaacttgtaaaagatttccttggttttgctttattagagtatgctaaaaagtataactacaactgaaaaatagaaatcaatcacaattttgttcctttaaataattcgcaattagaacaaatagctctaaagttaggagataaataatgactggtaaaattataaaattctgatctgatgtagttgaagtaaaatttgatagagttgatttaccttcattaaatcacattttaactttacataataacacaacatttttacttgtaaaaagattagtaaatgaaacaactattagagcaataattatttatttatcttcagaaatcaagataaatgatgttgtaaccaacacaaaaagaagctttgttgtgcctgttggtaagaactctaaaaacaacatttacagttttgaaggaaaacctttattaacaaatagaaatgcaaattctcctttatatgttgaagtagattccacaattaataaatctagattctttgatgttcaagcagaagtaattcaaacaggaattaaagctatagacttttttattccaattattaaaggatttaagttagggatttttggtggagccggagttggtaaaactgtgttaatgaaagaaataatttttaatgttaacaaagataaaaaatctatttcaaatattttcataggttctggtgaacgttcaagagaagcgattgagctttttaatgagttagaatcatctaatttaatgaagaattcatcaatgtatatttccaaaatgaacgaatctccaggtgctagaatgtctattgtgccaattggaattactgcagctgaatatttaagagattacgaaaaagaagatgttttattatttattgacaacatttatcgttttgttcaagctgaaaacgaggtctcagcttcactaggtaaaaaaccttcagttggtggttatcaatcaacgttagattctgatgttgcttcagttcaagaaagattatttaaaaaccaaaatggagcaattacttcttttcaaacaatctttttaccaatggatgacttatcagatccatccgcagttgctgtgtttaatcaccttgatggaaaattagttttatctagagaacaaagttctaaaaacattttcccagcttttgatccattagcttcttcatcaaattcagttaatgaaaaaattataggtaaaaaacattttaatgccataatcgaagctaaaaaaatacttgctaaatataaagaattagaagatgttattttaattttaggatttgatgagttggataaagaaagtaaaattattgtaaaaaaagctttacaattagaaaactttttctcacaaaatttcttcatgactgaacactttacaaaggaaaaaggagtttttgtttctttagaagatacagtagattcagttattagaattattaatggtgaatatataaatcaaagtccagaaatattttcttacgttggttcaaacttgaatattccaacagatgcagaattagggttaaacaaaaaagagtagataaattctactcttttttatatttgaaaattgaataatttttattgttcttagtttttatagattattagacaattagcaatattatttttgaccaaagcaaaaataaaaaacctcctttaaaggaggtttccagacaaggtggcatatttacaatatgcttaaaacccacataggcatcatcacttatccgtttacatagtaattatataagaaaattttatttttcgtaaaaattaatttaatttttttaaatcttgtactctttggaaaatatcaaaataattgtatgttttttcataatttatttcatgaaaatctttatttaaaagaattatacttcttcctaaatcttttaaatactctttatctatagttaataatttttgccataaatcttttatatttgaaggtaaaaacaacatcacaggtttattttgttcattttttacaactatcattttgagtctattatttcattgatcttcatcttttattgcatcagcacttagagtaaaaacattgtaagaaactttgttattttgatcaattactggttctacaaacaaagaatttaacataaatttgtttttaggatgagttaatatgtattttttaagttcaggatttaaagattctctttgcgaaatatcttcattgtcatatttttgttgaattttatcttttaagtaatgtgaatcaaaaaataaaggaatattgtttaaaagtttttggtattctcaaacagctggattagaaaattgttttaaaatatcttgctttaatacagtaaattttacaatagctaaatctactccagattcataattatattctcttgtaacttgagttttattgttgacttttttaacaactttatcagtaattgccttgattttgaagttttctcctgattgtttgaaaaaagtaattgtattatctaatggtgtgaattgaacatttggatcaccattttttagaatataaaaacttaaagaattattttcaaaattttcttttatagttaatatcattcctatgtggttttgttcaggaatatctttattatttcattttactaaaaatggaaaatcattttcaactaatattttttcagaattatcttcagtttggttctttttaaagtaaagattatctttttgttttttgtcaaataattctacttgttgacgttcaaaactacttttgtttatattattgtcaaaaacagaagaagaaagaacatgtgtatttttgatttgagtttgattatcattgtcatcaaaaacataagttttataaatttgacttagttggaaaagtttatcttcacgttcaagagcttgtttcttttctgttgaaattattatggtgctaaatgtaataattgccacaactaaagcaaaaattgaagcaataaaatttttatttttaaaaagtttttttcttcttttttctttttgttccataaaattctccatatttttggtctctaatttattttactcctaattgtgtttgagttttaaattttttctcattttattttttaatatttcaaaatacaataatggtattaatactttttgaaaaatgaacttttttaatttaataattttaaaataaagtaaaatctactcagaatgagaaattataatgctaaaacatacaataacgcttttaaagcaagatcaaaaaaaataattttttagtcttctttcttcaattattgttaaatgtacacagtttttcttattcctttattattgattttattaataaacaaaatacagtaaataattcaaattttattttatgaattttaattgcttgtttttcttttgttttctttattatttttagattattgtatgcttttcaaagtaataaaaccacttttattatttatcaaaaaaatgcagatagagtttctagaaacattttacaaaaatcatatgaagaattagtcaaaaataaagaatcctatatgtcttactataacttaaatttaatgtttgctaattctctaacaagtacaatttattcagatttattttatggaataatttctatagtttttcctattatatttatattattgttaaatatccaatcatgaattttaatagtacattgtataattggttctattattagtggaattttattatttaaattttctccaatactttacaaagtacaaagcaaaattcaagaacttttacaaaattacacaagcaaagaaattaaattatttggtttatttaatttattttattttttttaacaaaagaaattttttacaaaatatttacaatctcaattattacaaaaatacacacaggaatacaaattattaaaatcatttcaaattatacctgttttttattgtctaaaatttagaaaattaaagttgtttaaatatataaatgcttcatttttaaagcaaaatttaacctgttaatacatcttcagaaagatattcatatttattgaatttacttttttcacttgatcaaatcaagatagaagaactaattcctaattgtccaataaacataattacaatcagtaaaattttagtatatatatttaagtgatttaatattcctgttgataacccagttgttccaaaggctgaatttatttcgaatagtaaatgaaataaattaaaggttcgtgctttattaatttgctttaaaaataaaggattttcaacagtttttgtacttaaattagcaaaagaggaactcccaactaataaagtaattgttactaaaaataaagaaatgaagaaaacaacagaggctctatccgagttttcaaaacttattgttttcttgaaactatgaattgattttttacccaaaatcttagatcaaattgataaaataattatagcaagtgttgttgttctaattccccctccagttgaagatggagaagaaccaataaacattaaaagagaagaaattattaaactcggttgactcaaatcataagtatcaaaaatagaaaatccagcagatcttgtagaaaaagtgtagaaaatcaaagcaaatactttgtttgactttgttccgtaactaaaagcactttcatctcctcaaaacccttgtgatgaacttgctttgtttcagaaagaatcaggattttgactttgtgtttcaaaaattaaaataagtgaagcaccaactattgtaacaattacataagttaaaacagaaattttagaaaataaagaaaatttcattgcatatctttgatttttaaaaattttgcttttaatataaagataaacatcataaataactggataaccgataccaccaataacaaaaagaatgattaatcaaattaaaataaaataatctgaataataaggcgcaaaagaatattttccaactatatcaaaacccgcattatttaaagcagtaatagtatgaaaaatagcatatctaatagaaattgaagcatttttataaggattattaaattcaggactttgtgctgttgattttaaaggatcaaaatttccttgtacattataaaagtaaaaagatagtacaaatgaggacaaaattattaaaataataaaaacagttaaacttgaaataattacacctttgatgtctccaaatttgttggctccacgttcagtttttaataaagtcttttgaaataaagacaatttaaatctaaaaatatagttaataatgtagatttttcaagcaaaaaaaccagcaccacctattaagattaagattgctactattgcttgaccaaattgattaaaagttgatgctgttgttttaacaactaaccctgtatcactaaaagctgaaactgtagtaaataaagcttcaaaaaaggtgatttcttgtccttgttgtaaggaaattttagaagttaaaagtaatgcaccaataaaaataatcaaaatataagttaagaaaatccattttactttgttaaattttaaaaagttattaaacctgttttttagaatttctcaaatgtttttaatttttatatcactaaatttcatatttttgaataataattttaaattattttacaaatataaaaccaatttttactaaataaaactttattctttcttttttcatagtttttaatagaattttaacaaccatgaaaaaagaaaatatttgtgtaataggagcaggtcgtttgggtagagctacaattacgcaactacacaaattaaataaatcagttcttgtaatagataaagatgttaaaaatttaaattcaataaaagattacgcaagtcacataattgaagcagatgcagcagatatcaatgccttagaagcaataggttttgaaaacattgacacggttatagttgcactagcagataatattgaaatcattgctgctttattagaattagaagttaaaaacataatagcaagagcagtaaataaaagacatgctcgggttttaaaacaaattggagtcaactgaattgttagcccagaagaagaagcaggaattcgtcttgcccttttttcaactaataataacttttttaaatattcagagactttgcaagaattaccaggaggttttgtaattggttcaacaacaattacatcaccaaaatatattggaaaaacaataaaaaatagcaaattttcaaatttacaagtttctgttgttataattaagcgagaaacaacaactatattaccttttggtgagtttgtttttaataaggatgatctagtaacatttattggtcaaattgataatgttattaaggtttttgagttagtaaatcaacataaaatagttgaaaactagctaaaaaataaaattttcaaaaaaaataaaaaaaatattttgcatttttaaaaaatagtgtaacatattgtaagagcaacgatagcaaaggggatcacctgataccattccgaactcagaagttaagccctttaacgccgaaaatactagagataggaagataggaagttgctttttttattgtcttttttctgatttttgagtaatatataatataaatatgacttttacacaagaagtaaaacaagaaattttatctataaaacataattttcaagattttgtttcttttttaagtggcattatttattctagtgctaagaatgttttagatgataatcatttaacttatgatattcacattaataaatcaacaatttcttctttaataaaacaaaaattagataaatttaatattagttaccaaaaagatcttaaaaataaaaattgaattattattgataaaaaagattttagtattaatttaaaccattgtttttctaaaacattcttagcaggagtttttgttggaactggaacaatttctaaattagattcccattcatatcatttagaaattaaattttcacaagaagaaatatcaagtaaagtacaaaaaaatttagcaaaacatactttatttttccttgaattaaaaagaaacaaaaatgttattttatatttgaaaaaatcagaacaaattcttgattttctaggttttattggtgcaattaaaagtttcaaaaaactaattgatattaaaattcaaagagattatgaatcaaatgcaaatagattaacaaatttggatatttcaaatgcaagaaggtcaggaattgcttcagaaaaacacaataaaaattatgaatttataaaaaaaagaagattattacatttattcaggcaagaagaagtaattttttttgatttaaaatcaaaagaaccgaatttatctttaacacaaatagttgaagtcttagaagaaaaatttggaattaaaaaaaccaaatcttcgctaaatcattgacttatcaagttaaataaaatagtaaaaaaatattcttaatttgttataattatttattatgaatttcttccaaaatgcttttaaaaaatcttcttttgagtttgttcattcagacgaaaaaagactttctaatagacttttaagttattctctaatgtgattatcactagggcttttgataattgcactttttagctttgcaattttaaccattaatccacttagagaaggttatttaaaattaatttttatatcatttaatagcagagctgcatcaatagctacaaatataattatggtattagtgtctgttggaattatgttttacataagtagcaaatctagaagacaaaatagttctctaggacttttattaaccttttatatattgtttatacttattcaagctttttgaatcccattagctatttattcttttattattgttagatcaattacttatacagatgaattaatatctgatgtattagctaatgttgattacaaaactatctcatatattttaatttcaatttcagcaccagctggaattatggcaattattggtgcattaggttgattccaattaatcaatttttcaagatttacagtatttatttgagcaggtttagtagcagaatttattttaattttagtttcttattttgttacaaatagtgttgttaacacagtttatgttgttattgtttcattagtaacttttgcaatgattggttataatttctgattaatgaaattagaaagtcaaattttaataagtaatatgaaaaatgaaccagaagttaaaaaaatatttttacgtgtaggtttagcttatggaatgtttttattagtttcttatttgagattagtatatattctacttaatattttttcaagaaaataaaagaaggaaattatgaaaaaaaatataataaatgttgatattgaaatctccttaggttcaaacataaagtatgaatttgatagaaaagctaaaaaattagtagttgatagaattttgagagcgccttttgtttatccagcaaattatggagctattaaaaacacacttgattgagatggtgatgaattagatgttttagtttattctaaagagtcttttgttccaggtgtacaactcaaagccagagttattggtgcaatgaaaatggtagatgacggagaaattgatacaaaattaattgctgtacatgaagatgattatagattatctgaaattcaaactcttaaagatttaccttcatcttggttatcagaagtagaatattttttttcaaactataaaaactgaaaacgtgcaggaatcacttcagtagatggttttgaagatgcaaaatgagctctagaagaattagcagagtgtgaaaaattattcagtaaatattctaaattatccaaaaaagactttattaaaaaaatgaaggaaaaacatccagaaaaatatttataataaaaatattttaaaataataaacaaacaacactacaatttttattgtagtgttgtttcatttacaaaacaaaaagaaggatttttatcaaaaaatgtttaaattagtttcaaattttcaaccaacaggagatcaaccaaaagcaattaaagctttagtggatggaataaaaaatcacaaagatcatcaagttcttttaggtgttacaggttcagggaaaacattcacaatggccaatgtaattgcacaattaaatcgccctgttttaatactttctcatactaaaactttagcttcacagttatatacagagtttaaagagtttttccctgagaatagagttgaatattttgtttcatattttgatttttatcgtccagaagcatatttgccagcaaaagatgtttacatagacaaaacaagccaaacaaactgagatttagaggcaatgcgtatgtcagctcttaatgcgcttactttaagaagagatacaattgttgtttcttctgtagctgctatttatggttcttataatcctaaagaatataaacaacattttcttaatttagaactaaatcaagaactaaaaccttctgattttgcaattgaattagttaaaattcaatattcaagaaaccaagttgatacagttcctggttcttttagtgctaaaggtgatgtttttattattagtcctgcttgaactgataagtacttaataaaaatcgaattttttggaaatattatcgaaaaaatttctaaaatccatccagtggataaaaaaataattcagacttttacaagctatacaatttttccagcttcagcttatactttatcacctaatacaattcaaactgcaataaaaactattttaacagaattagattttcaactaaattactttgaaaaagaaggaaagttattagaaaaacaacgtttgaatgaaagagttttgaatgatgttgattcactaaataattttggtttttgcaagggaattgaaaactatgcaagacacatagaccaaagagaggcaggagaacaaccttatagtttattagactatttgcctgaagatgcacttatttttatagatgaatctcatgaaatgattacacaattaaatagaatgtataaaggtgatagatctagaaaactcagtttagtaaattatggttttagattaccttctgcactagataatcgacctttaaaatttgaagaatttgaaaaatttaaacaaccaaaaatttatgtttcagcaacaccttcaaattatgaaattgataaagcagatggcgaagtaattcatcaattaattagacctacaggacttttagatccagttattgaagttcgtccaacacattcacaaattgatgaaatttacgatcttttacaagaacaaaaaagtaaaaatgaaagaactataattctaacaacaagcaaaagatcagctgaagaattaagtagatatctagaaagtaaaaaacaaaaagtttattatattcattcaacatttacaacatttgaaagagatgatattttaattaaattaagaaaaggtatttatgatgcaatcatagggattaatcttcttagagaaggaattgatctaccagaagtttctttagttatagttttaaatgctgatgaagattctttttttagatctaaaacttcattgactcaatttgttggtagagcagctagaagtaatcatggaaaggctattttctttgcagacaaaataagtaaaagcatggcagccacaattgctgataatcaaagaaacagagcaattcaacaccaatataatctagataataacataaccccaaagcctgttatcaaaccaataattcaacaaattagagaaaaagatcaaaacaaaattatttctttaattcataataaaaacaaagaaactaaagcagaaaaagacaaattaattgcttcattgagaaaacaaatgaaagatgctgctagaaaagaaaattatgaattagcaatagaacttcaacaagtaatcgctgaattagaacattcttaaatcttttaaaataattaataataaaaaaacacttgataattcaagtgttttttaatgaatatttattaattgaaagttctatctaaatattgaaattgatcaggaatatcaaatgttttatttgtatttaatataggtgaattgtaatctaatgtaaatactttagtaaattgtcttcttcaagtttttgttgattgatcatatattggtttagggaaaagaactgttaattcaaaactaaagaaatgaacaacttcagatcataataatcttaaagacatattagacagtggtttgaagaatacttttggttgtgtttgatcagttactcctgaaatattgaaaaatctttttgctaatccaagttttccaaagtcaaaatcaagtcttccacctttaatttctactggtccaaaagcacgtccttcttttagtggtacagaaattgttcaaaagtttgttcttctaaatgagtctctaacttcttttaacaatcttccatttactttatttcaactgaatttaactgatttaaaagcatcatcttctgttttattattttgattataaattcataaaggaattgaattgtcttcatcttcgattataacttcttttaattcgctttgttcttgagcatattggtagtaaagtaaatcacttgctgagtttcagtgtcctgctacttttctatattgagaagcaattgaagcaaaagctcctggtgtttcataagctactctaaattcaactgttgttgtataagaaaagtttgcaaattttccatttctttttgttgttaatctaactctatctggtgaatctccactagctatataagagaatttgaattgatcatttgctctgaaatttacataatctcaaagaatattgtttttaactaatgagttataaattggataaggactattgtattgtaaaacaacatttgtaggaataatatctttaattggtgttcaatcccatctaaaatctgaagtaaaaattaaacgatttacatacacaaatgaagttgctttaattctgttgttatatagtaaatcaaagaaaggagattcagaaaatccttcttttacaaagacacttctaaaaattaaagcattaacaaaaggtaataaagttttatcaattacttttctaactgaatttggatttatagtggatgaatcattgtataaactattaaaaatatcccaaatcacatttggtgcttttgaatcattattaaaaccaactagagcttttgttacagtaataaatgtgtgtttgtatgatgttcctaaaacttctaaaaatggttttgtgtttcagtcatttctaaataatgcaacaactaatcttactaaagcttcagataatttattgttagcaaattttcttatatgttcgtccaaatgatttagaagatattgtgataaaccaaataaaggttcatttgtttgttcagaaattaataaaatttctttaaaagtgttaaaaccttgaggtatttgactaacaacattttttagttttgtgtaatattgacttcagtttcgagttgtatctttttcttttctaactttttcaagttctccaaatcattttttctcatattcactaccttgtttcttgtaaatactaattaaactacttaaaacagattctctatattctgaaccaacataacctgaagaaataatgtagctaactaaaccaaaatcttgagaattaatagctcctgatgtacttaaaaaatcagcaattgatctgtatctggttttaataatatctctagctgatttgttatttaaaatatcagtaaaaatttctttaaatcttcaagcagtattgagaaaattcatattacttgcatcaatgtatttttgaagattttgcttcattttttcttgatttagatgctcaaaatcatctttaaatgaagttttttgaacattttgaatttgttgtaattgttggctattattttgtgaatgaggagaagttattgcgcttgctaattgaacagcagtagcaagggtttttaatgttgttttcataattttttcttccttttaacgtattttcggacaaattataatacttctttgattctttttaataataacttattaaaagccaattttgtaatataattgtattgccattgaaacaataaccttgtaacctggtcaggatagaaatagagcagccatatcgagaagtgttgtgttcagtggttttttgttttcttattttttaaaaacttttataatttaataacaatttttatagataagaagtaattttaattttatgaaagaagaaatgaacacatcccaaaactataataaaacttctttaaaagaaaaaataagaaaattaaaaaccaaaattagtaccgatattaataatgaaattttttctctaaatagtaaaccagttacttttaaaaattttttaagacaaaaacgttgaagcatttttataatgctaattgcttcatttttgtttactgttggagttcacatttttatacaaaaagccaaagtggttcctacaggaattgctgctttgcctgttttaattaatttaatttgaccgagcacagttaaatttttttcacttttgtatttagcttttaatattcctttgataattattacttataaatatgttcgaaaatccttcattttcttgacagttcttggaatgttgtttcaaaatttatgaactttaatatttgaaatagatgttattaaaaaatgaatagatgcaaccataagccttcgtaatttagctaataaaccacaagatacttgagaaattattttttatacattagttggtggaataatttctggatatggaatcggattgggttgaaaatttggaggctcaacaggtggaactgacttcataacaaactatatttcaggaaaatataaaaaatcaattggaaaaatgagtttcattctttctattagttttgctgttttctcaattgtcataatttctttaatgaaacactataactctaattatggtgacccttttacttttcttcaaataataggaacatttatttatttactaaccacaacaactttcttaaataaaatttatcctaaatacaaaaaaatgatgttaactatttatacaacacatgcagaaaaaatttttaaatatctaaaagaaacaaaatactgacattcatttcatttatgaaaaggaatttcaggatatacacaaaaagaagtacaaaaaattgaaaccattgttttttatatagaaattaaagctatattgcaagaaatagctaaaattgatcccattttttgattctcaatttctccaattttaactacatccacaagaattgatacttctaaaatagactaaataaaatgactaaaaaatataaacaaagtgtactgataaataatgattcaaaaaaacaattattaaactactttttgaagcacaaatttttcaaagattacgatgaaatcaaaaatgagaatgataatgaaataacactcgtttattcttcttgtttactttcattaaaattttgtcaaataacacaaaatttcttcatttttcttcatttttctaaatcagataaaagtgctagtttgtttaaaatacacattttaagattttttaaaaaactaaaaaaatacagtaaagtttttttgcttacaacagatacacttgttggtttgggaacatttttgaaaaatccaaatctcaaacaaatttatcttctaaaaaaaagacctctgattaaaaaaataataattttaataggaaaaattgaacaattaaattccttcatttcaaaagaaaattatcagaagtatcaaaaagaatttcaacaacattgaccaggttcaacaactttaataattgaaaaacaaggttttagaattcctaataatttagctattcaagaattattaattaaagaaggtccagcttttgtaactagtgcaaatatctcaaatgaaaaaaatttaactttagaacaagcaagaaaaaaatttttttgtatttttaatgtttataatttaactattggaaatggaatagcttccaaaattatagatttagataataataaagtattgaggtagatatgagtacacaacaagataacaaaattataaaaatagcttttgcttcagatcatgctggatttaaattaaaagatgaattacttgagtatttaaaaagcaaaggttatcaaacaattgatcttggtccagacacagatcagcaaccatcttcttatgcattttatggtaaaaaattagcacatcaacttttagataaccaagcagatttgggaattggagtttgtggtacagggcttggcatttcatatgcacttaacagattcaaacacattagagctgctagagttgtaaatgaaaatgatgcttatctagctaaattacacaacgatgcaaatgcaattgcactatcaggaagatttacttcttttgaagaagcaaaaaggttagttgacacttttttagctactaaatacgaaggtggaagacatcaagccagaattaatgaattggatacagattaatgccagaattaccagaagttgttacagttgttaatcaactaaatgaaaaaattatcaataaaaaagtagtttctgtcaaactttataaagaaaaattactaaaaaattccacagttgagcaattagaaaactgatttgtaaatgagaaaattttaagtgtaaaaaacaaaggaaaattcattgttttttattttagtaatgacaaaattctaatttctcatttaaggatgaatgggaaatatttttttaataactcatctaaaaaagaaccacacaatcatttgatgattcaatttgatgataatacttttttacattacaatgacacaaggatgtttggtacttttcatattaaaacaacaaaagattatttaaacacaactcctttatctaatgttggaccaactccaatggaaattagtgaagaagaattatttaataaattacaaaaaagcaaaagatctattaaaccaactttactagatcaacaaattgtttctggtttgggaaatatttatgttgatgaagttctttttgcttgttcaattcatcccctaactaaagcgtttttgataaacaaaaatgaattaaaattaattaaaaaattcgccacttcaatattattaaaatcaatagaactaggtggttcgacaattaattcatattcctccttaaatatgcaagagggtaattttcaaaattttttacaagttcatactaaaaaaggttttgcttgttcaagatgtaataatataatagagaaaattacagtaggaggaagaggaacatatatttgttccaattgtcaaaatgaaaaaaaacaaagtaaactataaagaaaacttagaagaaaaagcaaaacaaattttagaaagttttgcaaattttaactcatcatctaaagttgcatataaccattcaattgaagatcaatcttatgatttgcatggtctagatactcaagaagcagttgctaaaattatgagtatactaaaggatttagaacataaatccagtgtcaaaatagttacaggaaatggatctggtgcattaatatcagagttattatctattattaaagaacaagatttaaaatataaaccttgtcataaccaacccaaatcttgttatattatttgaaaaaaattttaaatttttaaaaatatggtattatatgcgagtattgataaaacaatattaataattatgattatgaaatttagaaattttgaaaataagaaaaccaaatttactaacaatattcttatggcaaatattgcattttttgttttgaaaatttttgaataatattagaaaagttaatttaaataaaaagcttgtattgttcaaaatacaagcttttttagtgataaaaaagaaaggagactatatgttaaaaaagaaaaaattactattaggttcattagtttcagtaattcccattagttttttagtttcttgcggtgtgactccgatgtgacaaaaacatgaattactatcaaatgttaatgcaccagatagttctttttatgctttttatggcttttctgattttgcaggttcacctagtaccgaaagtgattatttaactaatggtccatatttggttcaaactatttacgaaggtgatactgttatggacaaagtagcaaaaccagataaaatagaaaagggagttactataaaatcttatcaatacaattatgtatccccttcttataaatatttcgctttagctgttgctaaaaaatttatagttacagttgaggatgaaaaccataaagatcaagtttatgtttttgataatgataaacatgaattgggaaaattaactgcaggtgaaaaaccaactcaatcaatttatactcttacttctaacgatccaaagtctataaattcaaaatttttccgtgatactttatcaaaagcaaaaaacttacaaattgaaattaaagagaatgttccttgagtggattatcaaggaaaaccaactaaatatacagtaaaaccagaagactttttttattcttgaaaactaaaaaatttattagatcaaacatatagaaaatctcatgggggaagcgataaaattgatgaaacagcaaaagcagctataaaaaatttaaatccccaaagtacaagatttgcatctgatttagaaaatgattatttatttaaagtttttggaatagataaaagcaaattactaaatgaagatacttttttaacaaattacgaaggtaaaaaagtattaaccttcacaccattgcaaactccaggacttcaagctaactatttccaaatgttgcaaaaaataatttttgattcatattactttgcaccagttccttctgactttattaatgaaagagttaaacaacaaacaaaagaagtatcagttctaaaagaagtaaaaggacaatctggaaaacccataacagtaagagttaaagaagaacaaggattatatggtgaaacaggcgaagctttaaaatatggtttctactgatatggtcaagattatgataaagatttactttatgcatcaccttgaattattaactatggagacaaaaataaaattgtatatataagaaatccatattatccaagaacaggatgaaaagaagcagaacctagttcagtgaaaaaaataactgttaaatactctcaatatccaaatgcatcaacatatacatcagctcaatttaataactttaaagaacaaactattccatcagtttcattctcaggtttatccgaaaatgataaaaaatatgcattaactcattttaaagaactaggtggtagatatggtttaggaaaagctttagattctattgtttgaagaacttatgcatctttattaccaggttcaatgaatcaagtaatttcctcaagcaataattcagatgttaaatatactgatccaacaaaactttataaatttaatgatgcattttcaagactttactttggatattcattagctgaaattgcacaaggtggagctaaagttgttccatatgtttttggtggaagaggacttcaatttagaagtattatttattcagcttgaaatctttacacaattagtagaattatatctaatacttctcttccttgatactcatttgtttctcctgataatattttggctaaagataaaactgcaagacaactttatgacaaagtatcaaccatttttgctatagacgaaaacggaaatagattctataccaaaactccagaagaagaaaagaaacaaaatataaacaatccatcaagtaacgcaattcaaagagaagcaccgaactttaaagttctacaacaaaaaatgaaaaaacttttagatgatttctatgcagaacaaaaattagatccaaaaactaaaattcaatgaacattagcaacaagatatataaattcttcaaataaagaaatttcagcatatcaagaagctgcaaaagcaatagaatctcttgatccaagattaagtattgatacaacatcagaggttcctgtaactaaagataattatttaaacttcttaattagaggaacaggtccatatcactatgtgggatgaagttatgactacaatggtgcaggaacagctatagatggattaacacaaaacgctggaactggattagcagcagctagttattttgcttctttagattcaaattctaatcttgtcaaatcattcccaatgttctacaaatattcaaaagcactagaagctttcttcacaaaagatgaatataaaggaaaaataagaccatttgctgaatgaaaagatgctccaaattcaccaaattttggacttagagacttaaaagatccaaatgataaaaacagagatgaaaaaccagatgtatcaaaatgaattacaaatcacattgttgaagaaaaggatccaacaactaacaaaacagtgaaaaaattcaaaaaatatgatgcagaattttcattaaatgaagaaactggattgttcaataaccaattccaattagctcatagcgatgatgaagttgctgaacttctttcagaaattacttcattatatagtttacaaccatttacactaggacttactacaattggaagcacaccaagtgttttctttttaaatcctaacttgcaaagacctgatacagataattcttttctaccacctgaccaaatcgttattaaaccatttcttaaaaaagaaggagaacaataatgctgactaaatacattttaaaaagattattactcgcaattgtaacttttatagtaatttacgttattgtttatttaataatggctaaatttggtaacaacccttttgttaatacggttgatgctataaaatccaaatcaacagatgcaagtgaacaattaattaaattgcaaaaagaaaatggttttgataaaccagcagttgttagattatgagattacacagttggaattttccacggagattatggaaaaatttacaaatccagtgaaacttcaattccggctttattctttaaaccattaagatacacaattttagtttcacttccttcatttatcatcagtgtaattttaggagttattttaggaactatttcagcttacaaaagaggtaaatgacaagatgcttcaataacatcttttgctacagtttttgttgctttaccttcattcgttttagctccttttataattttaatagctctaaaagtaaatttaccttttgaatttaaggatgccgaagattattcagtaggaacaatgattacttcattaattccgccaattgttgttttcgtgctttcttctatagcaggatataccttcttagtaaggaactgagttgttacaacattgtcttcacatcaagtattaattgcaaaagcaaaaggattatcaaaattcaaaatttttacaaaacatgtcttcagaaatgcttcaattcctttagtaagaacactaattttctcatatttagctctactatcaggatcaattattttagaacaatttttcagaattccaggttcatcaacaataatagttaatgcaatccaagatggagaaataaatgtttcaatgttttctttaattttctttacttcactttcattagttactgatattgttgccgatctttcatacgtatttatggatccaagaatttcaatagcttcaaaatcagaaagaaattactgagtagaatttaaaaaatgaagatcaagaaaacaaagcaaagaaaaattagaacaaggagaaatgagtaatgtctaattcatcacaagaatttaacttaaaatatcgcttaacacaagaagatcttaagttactaaaagtttctccaaatcatttcaattcttttcaaattacaggtaaagtttctgaactttgaaaagatacattaaaaaactttttcaaaactccacttgctttaattgcaacaatagtcttcattttgcttcttttaacagcaatttttacagctgctttttctccatttgatacaacaaaaccaatttctggagtagataatgaacttgtgttttcacaaaaaccaggtacttgaggtgtgtttgaaaacaatatctcacaagatcttttagacaaaattttgagtaagtcaacaccacaacatccattaattcacggtgttgtagaagaaatagttccgggaagatatttagctaatttcaatccatatgaagtaatttcagtattagcaaataaacaaattttttctattgtaggaacagatgaatttggtcgtgatatctgattaagaacttgagttggaacacttaatgctttaggaatatcagcaattatagctgttatagaaagtgtaatcggtgttcttttaggtacttatttaggttaccacataggaaaatgaattgacaatatcttcttaagaataatcgatgtgtttaactcaattccttgaatagttatctttgttatatttataggaatttttggaccaaaaacaatagtaattataattctgttaacagcaacaggatgaactggtccaacttatttagctagatcttatacaattattattaaagatgaagaatacattcaagctgcaaaagctgttggtgcttcaaaattaagacaaatttattcacacatacttccaaatattttaggaaaactcctttctggttttgtatctagactattatcagctatctcaattattgctggacttgctttcttgggatttttaaaagaaagcgctgattcaccagctaatttaggattaattattaactcttcaagacaactagcagattcaaatatttgagctttattattcccatcctttatattggttatattagctttaagtacaagatttatagcaaacggaattcacgacgcacttgatccaagaattggaggtagaaaataatgtcaaattcagaagtaaaaatcaacttagaagataaagttttagatttaaaaaatttaaaagttgccttcaaaatcaagggtaaaaagtacgttgaaatagtaagaggtgttgatttatccattagacgaggacaaattgttggtcttgttggagaatcaggatctggtaaatctgttacttcaaaagcgttattaggtgttaatgaatttgctaaaacaacagctgataaaatgttaattagtggtattgatgttgctaaatttacaaaagataaacaatgattacaagttagaggaaaaaaagtaggatacattccacaagatcctttagttgctttaaatccaactagaactattggaaaacaattgcttgatgttcttgaaaaatcagatagatttaaaacaaaagaagaaaaacaagaatacttgatttctcttcttgaatcctttggatttgaacgtgcaagagaaagatttaactcttatccacatacactatcaggtggtatgaaacaaagaattattattgcaatgactgttgccgcaaatccagatttaattattgctgatgagccaacaactgctcttgatccaacagttcaagcgtctgttcttgctttgtttaaccaaattagattagagtatggaatttcaattattttcatttctcataacatttcagttattgcaaaattctgtgattatatttacataatgtatgctggaaaaatcattgaaaaaggaacaagaaaagacatttttactgatccaagacatccatatacttgagctttaatttcagcaattcctgaagatagagatgaaaaactttataccattcaaggttcacctccagatatgaaaaatcttccagctggtgatccatttgctccaagaaatgattatgcgttagctttagattttgaaaaagaaccaccattaatttctatatctaaaacacatgctgcagctacttgattattacatccagacgcaccaaaagttgaactaactaaagaactacaatccagattaaaactatttaaagaggtattaaaataatgcaagttaaaccaacattaaaagttcaaagcttaaaaaaatatttttccaataaatttggtgttgtcaaagctgttgataacgtaaattttagtatccaacaaggaaaaattttaggtttaattggtgaatctggatcaggtaaaacaacagttggtagatctttgattagattatatgaatcttacggtggtcaagttactttattagatgaagttatttctggaaacaaattaacaaaaaaacaaaatctatttttaagaaaaaatattcaaatgattttccaagatccatattcttctttaaatggacaaaaaaatatttattctattttaaaagaaccattgattgttaatgggattttaaaagaaaaaatgagggaactttttcaagattgaaaagaagttgttaaaaactttaaatatacatttttggataaatatttagaaattgatattcaaaatgtacacgattacaataaaaaacttactaattttttagaagaatttgaagtaaaagttaatctttgaaaacctcaatttgaaaatttaagtcttgaaaataaaaaagaaattgaagaattttttaactcatattttacttttttagataaaaaacaattaatccttacacaaaatttcaatgatgtttataaaagagctggaattttatataaattctattttgagatgcaagaaaaataccgtaaaggtgaaatttcttttgatgaagtagatgttaaaaatacagcaaatcagctcaaagaaattcgtgaaaaaattaaagatatttctcactttgtcagagtcaaagaagatccaacccacttagatcaaatatcacaagattgagaaaattgaacaaagtacaataactccaaaaacttactaaattcttatgtgtcacaatacaaatatgagtacaaaatgaatttgaataatgctttaataacagaagatgttcaaaaatattcatattacaaaaaactttcagttgttaattacgaaatttatagttatttaagtttgcattttaaaaaatttactaatttaactttttctaaaattgaaagttttattagtcgctttgaagagttaaaagaaacatttttattagaaaaacaaaatgttttaatagttaatcaaaaaagcgaaaaatttgaatcagttacaaatttcagacatgaattcattgatagattatctaatttaaatgttgatgaatttgttgaagattcagattataacggaagtcttcattacaaaaataaaccaacaattttatttgaatctgtatttagtaaatataatgttagttttcctaaaaaagataaacaactaaaatcttatttagaagaagagctcaaaaaagttggtgaagctcatgaacaagctaaaaaagtctttgatgaagaaacaagaaaatttattgaagaattctccttagttcaaaaagcaaaagaagaagaattagctttatttacttcacaaaataaagaattaaaagaaaaaatagttaagttagaaaaagaagttgttgaacttcacaataaatttttgacactaattgcaaaagataaagatctttacaatagctttaaaaatagatttaaagaaaaacaagaagttataaaatccttttctattgaaaacaaaaacattttcaaagtttataaaaatattagattatttttcggtattgaaagttcagcttcatatactcttctaaaaagaagaattaaaaagtttattactagtgaattaatttatgaagctctagaaagtgttggattactcagacaatttgcttatagatatccacatgaattctctggtggacaaagacaaagaattgttattgctagagctttaattgtagagcctaaagtgttaattgcggatgaaccaattgcatcacttgatatttctattcaagcgcaagttgttaaccttcttaaaaaattagttgaagaaaaaaatctttgcttgattttcattgcgcacgatttatctattgttgaatatttagtggatgaagttataatcttacattcaggaaaaattgttgaaagaggaaaaactcacttagtttataataatccaattcacccttatacaaaaaacttgcttgagtcagttcctaaaatgtctaatgcacatattcctttcaaacctttaccatttgttaatgcttacttagcagaacaagagtttccaaataaaatagtttcacaaaaagtagaacaacatcattatgtttttggaacacaaaaacaaattaatgaatgactcaaaaaagcataattaacatataattaaattatgtcgaaagaaaaagtagtttcattttttagaaaaaaaattctaagagattttaataaagcatctcttttctgaattgttttttgaactttagtttcaattattttgtatttagttttagtatacgttagaaaaagtacttgatatgatgcacaatcagttgttggacttttattaatttgtatgagtacatttgctacagtgcttagatttggattttttaataactattctaaaagctataaaaattgaagaatatcttcagaaaacaaaatgagaagagaaaatcatttagaagaactagagtttgtaaatgatgacaaactaaaaagtgaaagaaaaaaaaaatcattaatccctattttattaggatttataaccggaatattattaatattgattacattgccatacttaaattttgcaaaataattttaataaaaaatattcaagctttgtgcttgaatattttatttttcctttaaaaataaaacttttataatttaaatattttagagtaattttggattctattaataaattttttaatttcttgtattttcatttccttttttaagttatcagttagcatttgttcaatttggcttaaactataaagagaagaaataaaaattttcttattttccttgattctactatctaaaacaggatttaaaacttgttcaataaatcaagaaacatcattagaactaacaaaatcttcaattaaaagataatcagcatttttaagttgattaattatttcaaatgcaagacctttttttgaaattgaatttgaatataaattaactaaatcaagaaaattggtataaacaacagatttttgcttagagacaatacttcatgaaagaattttaaaaaatacagttttaccagataaagagggtccaaaaataaaacatcattttttacttttaggtacttcttttcataaattataaacattacgttttacttcattatttatttgctttaaaaagttttctttaaaactatctgataaatgtgcagcagaaagttgtgaaatttcttttagaaaaatatacttttctaaaatttcagatttatctttttgtgattctactagtttgatttttaaagcatttgttattgggtctctaataattatttttaaaaatttagcatttggttcttgatctaaaaaatttaaaaatacatcaatattatctgttaactcttctttagaaacatttaagttcttaataattttttgaacttcaggatcagcatttattttttctaggaaaaattcttttattttttccaaatcttcttgattattttctattgacacatcacttaatgagattttattagtcttcattttatcattccgtttcttctacttcttttaaaaaatcatctattacatttgtattgtttatttcttctgtatcattttgtaaagtttcatatggatcaaataagggcttagattttgaattaattttttgtttgtattcaaatttttctaaaagttcttgataaacctcatgatgtaaaataatttttttattaaataaatcttttgctattttttcaaaatattgaaaattaattttattattaattttataacagtaatctaaaatttcatttaatgcatgaaaagaaaaaccaagttggtgataatgttctactttcttttcaagactaggaataggaagtctgtgagttaaatattcaatatatcttttactatttaaaacttgttttgcttcaatgttgctttttatatcattgatatgaacttcatctttaacatcatctgaaataaagatttgaaaaaagttagttgatacttcagaaaatccttcttttttatagtctttttcagaaaatctttcaattaactcactaaatttgttttgacctatttttttaataagtaattctgaaaaataatgattttttaaaatctgattaatagttgaaggtttttttaattcaataagtacaacttttttttcttcattataaaaggttctgattaaaccaatagcttctagaatctttttgtttttttcaaaaactacttgatccattttgaaaatggattctaaatcatttagattcaaaaattcttttttctcgttaaaaaattcaaaatcataaaaataattaaataaaatataagcttctttttctattataggcaaataaaaaaatcttattaatctaaaatcttctttaccaatattttttgttcccaaaattaaatattttttattcataaaatctcccaatttatttgttgatttaattttataaatttttatttaattctgaaaaaaatttaggaaaaaagtcttcatttttccactctgaattagagatattaacatccactttgtgacaaaatcctttatttaagaagtcatttaagctagaaatcgagttattaacatttttattaacaatatttttaacacgttgttcctcagaagaaaaaatacggattactttatcgaaataaacagcaaagtttgcatttttagaatataaattaggaatttccacaaaatcatatttattattttttaaatgttcttctaaaaaaggataaacaagtttttcaatgatattaatattatctggattacttctaataaattctcttaatttttctttatttaccttcatgtctttaacaaatgcaggattgtagttttttaaagcaagataacaaggattgtcttttaaatagcacatttgaaaaaattcatcagaaaataaaattttttgttctttttttaatacttttttactatattcttgaagtaaatttaaaaatgttgtttttcctacagcatattttccaatcactgcataagttttgtgtttattttccatttaatccgattcttttcttaagatttttgctacaccagcgggttttgatttaggtccgattttattggctattttttttaagttctttgatcctgattttaatgctataagtgtacctacaatgttttttgtagaagcatcattcatagaatcacctatatgaattgtattttctaaatcaaaattttctaaatttgcaataaattttaccacttctcctttagttgcatttttattagtgatttctattgctcttcctttagctactaatgctaaagaaacaactcctttgtattttttctttatttcgtaaaaagtcttcacaattttctttttcgaaatagacattattaaaattttgtgtgcattttctgttttaaaatcttgatattgaaaagatttgaaactagtaataaaagccaagatttggttttgtaaaccttgaccaaaaagatgttttgcattatcagttgaaaaagaaattttttgtttttgtgcaattttaaatatatcttttactaaataattctggattatttcttcttttaaaatttgattatttataggatttaaaatgtaagaaccatttaaacaagcaacatattttgcttgtgtttttttagcaatttcttcaactttttttgaatattttcttccagttgaaatcacaattatgttcttttgtgaagcttctacaactgctttttcattttttttactcatactagcagaaataccaaatccaacatcaaggagtgttccatctaaatcaatgaaaaaaatttttttcttcaacatattgtttataattatataaagatagaaataaaaattaaaaaattaggagcaaaatgaatttttgatcacatgactattcagcatatatagtaatgattgttgtatgagcagtagtttttgtagttttcttgttggttgaattttttacaacaggtgtttgatcaggtttaatttcagtttctgcagttattccatttattttagcaatcacaactaatggtcaaatttgatcaataacattacaaatcattctattcattttattgttcttaattctttatttttctttatttaagttcttaaaacgtctttttaataaaacagaatatgaaggaccaattttagaattattagatttagatcctattcctttaacacattcaagttcagaaaaaggatttgaagaaactaaatatggacaaatcaatattcacggaaaaatttatcgtactttatctgataaaggtcaaggttttatttctgagggaacatttgttaaagttgttcgtattgaaggtactacactaatagttcaaagagcaaaaatgcaagaagacacaataaaaggagaataacaatgacaacagcaggtttagtaattttaattatttttataataattgttattatattagcagtacttttaatttccagaattaaaattattccgcaatcacatttttatataatcgaaagacttggaaaatatcacagaacaattcaaaatggacttcactttatttggccatttattgaaaaaattggtttaaaagataactgaaaagaaaaagtgtttgactttccagcacaagatatcattacaaaagataatgctaatattaaagttgattcagttatatttttacaaataacagatccaaaactctttgcatatggagcagaaagaccaattaaagcaatcgaaaatctatcagctacaacacttagaaatttattaggagatcttgagcttgatcagacattaacttcaagagatacaattaatttaaaattaactcagatattagacactgcatcagattcttgaggaattaaagttcatagagtagaaattaaaaatataattcctccaagagaaattcaaaatgcaatggaaaaacaaatgagaactgaaagagaaaaaagagcaaatgttttagaagctgaaggatctaaaacagcaaaaattcttgaagctgaagcatttaaacagtcttctattcttgaagcagaaggtaaaaaacaagcagctatcttagcagctgaagcagaaagagaatcacaaattttaaaagcatcaggaaccaaagaagctatcgaattattaaatagcgcaagagtatcaaaagaagtacttgttttaagatcaattgatcagttaggaacattagctaacgggacagcaacaaaaattattatcccacctaacttatcaaatgtagcttctacaatggctacagtttcagaattatttaaagaagaaaaaacaagcgaaaacaaataattttttcaaaagacttaaagaagcgaatttaagtcttttgttttttatttgtttgttatgctttaaattttgtaaaaatttagtaaaattttaaaactaaataattttagaaaaagagaaagaatatgagtaaattgaatttattacaaaaaattgctcgtcttaattccaaagaaaaaaacaaccaaccaaaaaataaaaaatcaaaaaaacctgtttctaaaaaaagaaaagtggtttattctattattggagtcggtgcttttgctttgattttaggattgggaattggtgttccagttggtgcttcaaaaacttctggagctttagttcaacaaagagataaaaacgatattttagtaagtattagtactcctacaggagatcaaaatatttctacttcacaacttttaagtgcaattaaaaccacaggtgaacaacaaaatgaagaactaaaacttgcaaagaaaaaaattgttgaatatctttatgatcaagaagtagaaaatgctgaattattccaaaaagcttgaaatgatacaaactcagataaaacttctaacaacggaaaaacatttactatcaaatcaaaagaagatgttagaaaagaagaagaaaacaaattaaaagatgaaagaaccaaattccaaaagaactttggatttaacaactgagaaacagagttcaataaagaattagcaactgaaaaatacggaaatgctaaaagttttgatgaggcagttgactatctaactttccaagctctaattcctgttgcttttgctcgttttaaatttgaattaaatacttcttttacaaactcagatgttacaaatagaatccttaaaaatgatattaaaaataaatcaggacaagtagtttttcacaaaggagatcgtctctttaaaaacattattaatttagcaacaaaagatggtgaagattttgttaatggattcttgcctaacattaaaaatccaaaagatgaaaataaaacacctgaagagatagaaaaaagtaaagaagatcaaaaagttgctgcttttttaagtaaatcatttgttaaagattatatgtatccaaaaaaactctttaacgaaatctattttaatgatggagctgttttaaaaaataactttcatttatttgatatgtctaaaatagttgtaaatgtaaaaacagatgataaaaattcacaatcaccttgaaaaatagctaaagcagatcttgaagaattattgacttattttttagttgaagtagaaccaaatgttcttaaagcaaaagtagtaagaaatggtttagattctctagaatccttcaaaaaagaagcagaaagttataaaactaatcaagaagataaggttttattaacagtaataaatccttcaaaaaataaaactcttgctaattcatatggaaaattaccattacaaaatctaagtcaaatttttgaaaacaattcagtacaatttggactttcctttttagacaaactctacaaaccaaaatcaacaactcaactcctttctaaaactttatttgaaaatattaaatctgaagtatttaaaaataataaaaacttacttcctgattcaagttctttagtaggtaaaactgtagcagaaataaaagaaattaatcgtcgtttaaaagactatatagaaaaactaagtgatacagaattaaacaaagcaggtgaagcatttaagaaaacttttggtgaagaaaaagataattttagaattagtaatagttattctctaactgacaatccaaatataagaatcgtttttgatgacaaaggtatgtcaattttaaaagtttcacaaattaaatcttgagaagaatttgaaaaaataattgacaaagaattacaactaaaagctaataaccaatttgataataaaataaattctaacattgacctttcatctttattatctgaacttcaaaatgatgattttgctttatattcttcaataaaagatcaaaaatttaaagatgttttattagcagataaaaacagaactgaagcagaaaaacaaaaatatttagacgacataactcaactttctaataattttttagtctcatttgtaattaataaagttttaaaaattaattcaaatgtacaaacttatctcaaaaaagaactagaaacaagactaattaatgattatgaatttaaccaaaacaaaaaaatctgagtaattaaaacacaaccggataaaacagcttcacaagcaatactagatgaattacaaagtttgtttaaagtaggaactaattaggagaaatgatgaaaaaaattagaaaatcactttgagttttagctcctgttttaggtttatcagcaattagtttaatttcatgtagctacaatgttgaaagtccacaaagaatagaagaggataaaaaactacaagacaaaattgttgcaagatatgtagataatgcttttgtagaaacaattttggcacaaaaagtttataaattcaaaccaagcgatataaaagctaacttcaatgatacaaattcagccttctttaaagaggcacaacaagcttttaatttctatcaaaattaccaattaaaacaagatcaaaactttacatacacaacatattccaaattattaaaagatcaagttttaaattcaaatgatttgaaagttcttcaaaaagatttaggttctggaagcaaatttgaaactcctgcatttaaaattttatataataatttagagacaggaatcgctgaaattgttaataaattattattagttaaattctttttattaaatcaagatagtaaagacattaaagattctaaaatttacaaagacggaacaagtgataaagcttcatacacaaccaaaaatattttagaaagcttagatacaaatgaaaaagatttcttcttaatgaagcttttattagaaaaacaaccagcacaagtttgaaaatttgaatcaacaaatactattgatttagcaacatttgcagcaactcaaattaatgatgcagattcttttaacgcaatagttctagctgatgctgcactggattcaaaaactacacaaaaagaagaaaattttgaatttttaaatgcaaatgattcaatagatttacacaacttatatggttatcaaggaattttatacaatcaaggtgttagctcaagaaacgatttagattattctttaacacatttaaaaaatgattttaaaatcagatcaggatttttagatgattcaaatagaatatttagccaagaccaattaagtttatatagcaaatgaaatcaagtaaaattagctccaataaaactgaaatcaacttttgatactaacaaagaaaaagaagcgcttttagctacagatattgacattgaagctgattctaattcacttcaaaatgctacttattctgtagaaaaaatttatccttctttaattacttctaataaaaaaagtgcagatgttgttgtaaaaattactattaaatcagataatcaaaaaataaaagataatagctatttttacaaagttatgattgattgaaataacaaagataacatcacttacactccacaaataaacaaagatggagaaaaattacctcaagaggttccagcaagtattgtttcactttcttccgatgcttcaaaaattagtattagttatgtaaataaaatcgttcctttatttgataaagttgtaactgatgaaaaaaccaaagaaactaagagatatttttctttagataacacaccttgatcttctttagaacaacaagaaatccttgctttttctttatttttagcagatcaaaacttaatttttaatgatgttaaatcctattttgaaaacatgggatacaaaataaatgttaaagattcagtaattaaattagatgatacaaaagatgagaaaaaataaataaaataatttagtttttatataattttaattatgaacaattgacaagaagaattatttttaaaaattatcaaaagagaagaaccagcaaccattttgtatgaagatgataaggtcatagcttttttagataaatacgcacatacaaaaggtcactttttagtagtgccaaaaaattattcaagaaatttattttctatatctgatgaagatttatcatatttaattgtaaaagcaagggaatttgccttacaagagattaaaaaattaggtgctactggatttaaattattaattaacaatgaaccagatgcagaacaatcaatttttcatacacatgtacacataattccttattataaaaaataaaaatttaaaaagtaatgtaaaaatttaatttacattactttttttgtataattatttcaacaggggtgctgtaaaaggctgagaaatactctataagttgatctagataatgctagcgtaacgagttgttttttatttacaaatttttaaagctatctctgtcacaaaaattaattaaggaggtagcttttttgctcaaaaaatttaaaaattttattctattttcatctatattttcgccaatagcatttgctatatcatgttctaatacaggagtagtcaagcaagaggatgtatcagttagtcaaggtcaatgagataaaagtataacatttggtgtttcagaagcttggttaaacaagaaaaaaggagataaagaagttaacaaagaagttattaatacatttttagaaaatttcaaaaaagaatttaataaactcaaaaatgcaaatgataaaaccaaaaacttcgatgacgttgattttaaagtaactccaattcaagactctactgtgttgttgaacaatttatctactgacaatcctgaattagattttggaattaatgcttcaggaaaattggtagaatttctaaaaaataatcctggtataataactcctgcattagaaacaacaactaattcttttgtatttgacaaagaaaaagataaattttatgttgatggtacagattcagatccacttgtaaaaattgctaaagaaattaataaaatttttgttgaaactccatatgcaagttgaactgatgaaaatcataagtgaaatggtaatgtttatcaaagtgtttacgatccaactgttcaagctaatttttatagaggaatgatttgaataaaaggtaatgatgaaactctagctaaaattaaaaaagcttgaaatgataaagattgaaatacatttagaaattttggaattttacacggtaaagataattcttcttctaaattcaagttagaagaaactatattaaaaaaccactttcaaaataaatttacaacactaaatgaagacagaagcgcacatccaaacgcatataaacaaaaatctgcagatacattgggaactttagatgatttccatattgctttttcagaagaaggttcttttgcttgaacacataacaaatcagcaacaaaaccttttgaaactaaagcaaatgaaaagatggaagcacttatagtaactaatccaattccgtatgatgttggagtgtttagaaaaagtgttaaccaattagaacaaaatttaattgttcaaacattcattaatttagctaaaaataaacaagatacatatggtccacttttagggtataatggttataaaaaaattgacaatttccaaaaagagattgtagaagtttatgaaaaagccattaaataaattagaaataaaaaatttaacatttaaaaataaaaatgatgattacataattttaaagaacctaaacttagatataaattctgataaagttttgtttttattaggttcatcaggccaaggaaaaagttctttattaaaaacaattttaaaacaaactgatgtaattgaaggaacaatcctttttaataaacaagatatttttcaattaaacaaaaaagaatgaaaatccttcttaaaagaagtaagtttcttaaatcagacaaccacttcaatcccttttgaaacagtttttaccaatatagtaagatcacttcaagattataaaaatttattttataatatgtttaatttagtgagtaaatctcaaaaagaagaaattatttctgttttaaaagagttaaatattttggacaaaatttaccacagagttgattcactttctggaggacaacaacaaagagtagaaattgctaaattaatgatgcaaaaacccaaaattattatagcagatgaacctacaaatttcctcgaccctaatatttctaaaaatattattgaattaattattaaaatggctaaaaaatttaactcaattttgataatagttactcacaatgttaatttaattcatgaatttgattcttctattttactaattaaaaatcaagaatatcatttttataaatcaaataaagaaataaattcaaatattttagaccaggtttttaaaaatgattaaagaaaatttattttttgaatgagtagataaaaacaataaaaaactaaaattaaaatgaaaaattttaattttattgctttcccttttattatttattttctccttttattccttatttcaaccaattaattatggttctacaagaatttttacaaaaaatttaaaagaattatttactttttcaaattattctaaaaaatatccaagttgaactctgtgacaattaagttggtattacatgtttttaactattcgttattgtgccttgggtacaactttaggctttattttcgctttttttacttcttttgtaagttctaattttcaaaaatataaatttataagatacattatcaatataataattatttttttcaaagcatttccaatttcattatttgtttattttttttctataggttttgacaaagaattagcagcaactttaattttattttgatttagttgattgtgaatgcataagtattttctagattttttaaataatctagataaaactaattacaaaattatgcatatgaaaactaatgaaaattttgcttcttttagaaaaactttgttcccttatatagttaataaatattttatgttttttgtttattcattagaaagcaacattcgctgaaccacaataataaatgctgctggagtaattgggattggattgctcttaaatgatgcaagagatttttcattaggttgatctgttgttggtatacctttgttagtaattttagtaaccattatattttttgaatttctaactctttttttaaataaagttatcttaaatataaaaaatataaattatcaaaacacttcttttttatgaataaaattaaattttagaagaatttttaaatgattttttgtcttattttttgttggattgaacatatattcaattataaaaatttcttcctttacactgtatccaaactatattaaaaacttttgaaatcatttttttagctttcaaaatgaagtattttcacataataaagaaaataatccgttttactgaattttaatattaatttatcagtgtatagtttctattacaataattgcaataatttctttggtattttccattttaggaaatgaaaaattaaataatgtgacacaatgaattccgcttcgttttttaaatacattatttagaataattccaacaatcatttttatttatttattttctatcttttgaataggaactaatatatttttattagtagcagtgataactgcattacgtaaatccactagtttagttaaacaattaaatgaaagtattaattcaattaattgagaaatatataagactttagaaattcaaggtaaaagtaaatttcaaagaattatcaaatttgtttttccatctataaaaaaagattatttatcatttttactattttactttgaaaatcaagttcaaacattaattttattaggttcagttggcgggtctttattaggttcaaaaataagtattgtaggccaagcaggagaaagaacagaaaacatcttggagttgatgacttactcttgaattagttgagtttttatagcaattattcaactcttgcaattctattttaatctaatagttcaaaataaaaaaattagccaactttatctaattaaaaatttaaatacttattttacaaaaattaaagtaatatttaaaaataaatttagttcagatcaataataaaaaaacaacaagaattacttgaggtgatacccttttcttgaaaaaatttttgagtgttttaattaattataatttgaaatgaatgtttccctaaatttaatgggagacattcattttattttatctttaatttgtttgtaattgtaataataaatataatttgcaattgctttgtaaaattatttaaaagttaaaaattctttttcgcgaccataaaaacattctccttttaatgtcccaaaaaatgattcaatgatgctattatctaaacaatttccttttcgagacatggactgagttattccttcttgttttaatttttctgaaaattgtttatgttgatattgtcaaccttaatcactgtgaaaaattaaaccttcaagatttttgtgctttgaaaatgctatttgaagcatttttctaatttgctggttattagcgcttgtagacaaatctcaagcaataacttcgccattaaacatatctaaaattggcgataaatatgcttttccaaatggtccgctaaattcagttacatctgtagttcatttttgatttggttgagtagcaacaaaatttctatttaaaatattgtctgcaattttgccaactgttcctttgtaagatttgtattttcttctagaacaaattgctttgagattgaattttttcattaatctgcgaacttttttaaatccaattttatagtctctattattaagttcagcttttattcttctttttccatatcttactttattttcttcaaaaataagcttcatttggcttataatttcttcatttttcttgtcaaaatcttcttttttgaattcataataaaaagtagatataggaatagaaaactcttttaatacttgagttaatcgaagatttttatcagcttttactctattataaatttttttattttttcttgccttggttgacttgagtcaaagatctctaccaaggcttttcacttttttagaacttcattttccttttttaaaagtttattttcttctctaagaagtttaagttcttcatatacagataatgaagaatttgattgatcttgactatcggaattgtttgatacttttgtagatttattattattaatcttagatttcattattggtcttcctttgtttaattttaaaccactaattcctgattctaaatattttttcgctcaaaaagatattagacttggattaagattatttttaagtgaaattttaatcattgtttcaccagctaaaaatcttttaactatgttaatctttgatctatagttcactttttatttcgtggttttttcttaagatcttcaactcctaatttgtcataaattttttctcaaaaatttacttgatttaaaaaatttttctgacttgttttagcaaaatcaggctttttaatttcaattccttttttgtatttttttacacattctaatttaaattctaatgaatatttcataaaaaatccccttttctatttttctaggaaaaggggatctgctcatacttgttgtttttttattattaaattgaattattttgtagctttggattttggattggattttttagttgcttcttttttaggttttgcttttttaacttcagttgttgttttagcagatgtttttgttttagtttttgtttcttttgcttttgttttgtctgaattagaagtagtttttctgtcttctttttctgaagaaactttagattttttatctgaattatattcaattaatttatctaaaactttggaatttgttatgttaacttgtaattgagttagaggaaatgtttttttaacttcctctactggttttttataaaacttagctagttttccatattcaaattcatagtcttcaggtctagcaaaaatttgttctagtttagaaatttctgcataaatgaacgcatttttaagaagatttattgattcagttctcatttgaagtttgatatcttcttctgtaaatttagtaatttctaagtattctttaagagtaaatccttgagattttaaattactttcaaataatttttctaatcttttcatttcatttaaaagtaatttttcagaaataggaatttgtacttgtttttgaatttcagcaaatgcttctctttggaatgcaactctgttttgttcaagtttttcattaaatgttaattttgataaatattctcttaaatctttttctgttttaacatcttctaaagctaattttttaacaaattcttcgtctaatttaggaagaatcaactctgtaattttgttaatcttaattttaaatttagcttcttttccagcataagcagttacatgataattttcagggaaagttacaaaaatttcttttttctcaccttttttcattccaactaattgctcttcaaatccagcaataaagttacctgaaccaatttttaaatcaaaatggtcagcttctccaccttcaaatgcattaccatcaataaaccctttaaaattgaaatttacaatgtctgagtttttaactggttgttttgattcttgaaatgcagctcctgattcaagtaatttttgaacttgtttatcaacatcttctttgctaacttttggttcaacaaatttagtttttaaatttttgtagtcaggtaaatttaatgttggatatactggatataaaaaacttatttctaatttggtttgagaaatgtcttcaattttgtagatcggaccatctaagacattatcatctgccattacattttgtcttgcttgtgtttctaattctggagttattaaagacactgcctctcttaaaatagatgtttctgaaatgtgttttttagcaagttttggaggtacacttccttttctaaatccatcaatttttaaattttttgttaatttagcttctgcttttgcttgcattttttttcataatgcttcttctggttgaagtgtaatctttagttctgaagattcagttaataattctctttttagcatattattctcctagtatctaactaatttatatgattagttttagtacttaatattttaacaaattacttcattttataaagtaaaatttaccatttttttaagtttatttaaagcaaaattaatggatttttgaattatttgttttcttgttcctttgtagttaagttctcaaactttattgttaattgcgataaaaacctgacctactttagttccttcttgtgcagttgggcctgcacttcctgtgaaagaaacacaaaatgtggagttaaaaaattttttgccattttttgccattgccaaagcagtttctttattaacaactccttttgaagtatctatatttaattttgctttaatctcgtttgtgtaggcaactaaaccacctttaaaatatttggaagctcctggagttgaaactattttagaagcaaaacctccacctgtgaaagattcaacacaagaaatagtttgttcagtattttccaattttcaatctattttattaaagtgataattttttttgcagtactgacaaatgagttcaattttgctttgtttttgaaggattttttcaacatcttcattagataatagttttaataaatttctggtattttgctttgaacaactacatttgtattgtcagagttttttatctaatatttttacatctagtaagttctcaaatttttcaagacccaaattctccaaagaattttgttttaaaagactttcgagtcaatttatgtcttcttcattgtgaattggaagaagttgaaaaatggctgattgagctttgataattttcccattggcatcaatttctaaaaataatttaactgcagaagcaacttgttcagataaattaaagtaaaaagctaaatcactaattagattacctttttgtaaattaacttgacctccgtaattttgttcatttattcgactaactacttttaaaaatcctttattgcctacagttttttcaaggagttgtaaataattaagttgtgaaaaatcctttatttctaaagcaaagtcatcgtgtgaaaacattgctcgaatatttccattactatttgaatctacaattaaagagtcaatattttctgattttaaaagtgtagtagttttttgatttttggaatttatgattctggataaaggcccaaaagtagcaatagcacttgctaaaataattgcagctactttatttgttttttgttttttgataatatcatttgctacttgtgtaaaatcagataaaaagattctaaagttgtttttaatagctgtttttgtatatgattgagtgttcattttgtcctatgaaattaaaataagaagtaaaatatcacttcttattttaatagtttttatatttaaatgttattaaaaaattatttttttgcaaagtgtaaagcaactcttacatattgagcaacaaatgaagattcattgtcatatcaagcatagagtttgtataatctttttccatttacatctataaatttagttaatgttgcatcaaaaatggaaccatgtgtattgttaacaatatctgaagaaacaacttgatcttcgttgtattggaatgattcattttgaactcttttcatttcggcattaacttcttcaacgcttggatttgattttaattcaacagataagtcaacaaatgaccctgtaataactggaactctaatagcaattccgtctaattttccagttaatgaaggaacaactaaaccaatagcttttgctgcccctgttgaagaaggaacaatattataagcagcagctctagctcttcttaaatctttgtgtggtgaatcttgtaatctttgatcagctgtataagcgtgaactgtagtcataaatccgtggctaattccgaattttttatctaaaaagtgtactaatggtgctagtgcatttgttgtacatgaagcagcggataaaattttgtcctctgatgtaattgtgtcgtggtttacgttataaacaatagttttaacatcatttccagctggtgctgaaacaagaacctttttagctcctgcttttaagtgcttttcacttccctctttagaagcaaaaaatcctgttgattcaacaactaaatcaactcctaattctcctcaaggtaagttttctggatctctttgagcaaaaattttgatttcgtgtccattaactactaatttgtcatcacctactgcttctacagtaccttggaatgttccatgtgcagaatcatatttaaataaatgttttaaaactggtgcacttgttaagtcattgattgcaacaacttctagttcttttgtgtttagttcaagtattcttcttaaaattaatctaccgattcttccgaatccatttatagctatttttttcatttttttcctttgattttaaagtatttagattaaatttattctatttaaaagaatctttttaattatactactttagatttaaatttaaataattcatattaaaaacagcctatattatagactgtttttggaaattaattttctttaacttcagcttcaattggttgattatctgaagaagtatcagaagtatttgcttgttgtgctgcagcttgagcaaaagcttgtgcagcttgttcaatttggtctaattttgtttttaattcttcaattttttcttcttttaccaagtcttttaattcttgaatttgtttttctaaagtttctttttgtttagcatctactttatcaccttggtcttctagagatttttctaattgattaattaaagcttcagctctaactgttacttcaattttttcttttttcttagcatctgcttcacgattttcttcagcttcttttaccattctttcaatttcttcttcagataaggtggttgtatttttaatagtaatagtttgttctttgtttgtttttttatcttttgctgatacagttgttattccgttaacatcaattgagaaactaacttcaatttgaggaactcctctaggtgcttgttcaattcctgagagattaaatctacctaataatttattatcagcagctaattgtctttctccttgaacaactgaaattgtaacttctgtttggttattttcagcagttgagaaaatttgtgatttagtaacaggaattgttgtgtttcttggaattaatggagtagcaattccacctaatgtttcaatacctaaagttaaaggtgtaacgtcaagtaataaaacatcgttaatttctccagctaaaacaccaccttgaattgcagctccaatagcaacaacttcatctggattaatggatctatttggttttttacctaatgtgtgctcaatcattgtttgaacagcaggaattcttgttgatccaccaactaataaaacttcatctaaatcttttgcttctaattttgcttcttttaaagcatccataattggttttcttgttttatctactaaatgagctgtcattttttcaaattctgatctttttagttctaactcaacattaataggtccttttggtccaatacccaaaaatggtaatgaaattgtagcaactgattggttggataaagaaatttttgttttttctgcttcttcttttaaacgagataaagccattctgtctttagaaggatcaaattcatattcttttttaattttgtcaactaatcaatcaacaataacatgatctcagtcatctcctcctaatttgttatcaccactagttgataaaacttcgaaagttccacctgaaagttctaatacagaaacgtcaaatgttcctccacctaagtcgtaaactaatactttcatttctttttcagttttttctagtccaaaagctaaagcagctgcagttggttcattaataattctttctacttctaagccagcaatttttcctgcattttttgttgcttctctttgtgcattattgaagtaagctggaacagtaataactgcttttgaaactttgttaccaatttttttctctgcatattgttttagataagaaagaatttttgcagaaatttcttctggtttatagtcttttccatttgcttttactgttttatctgttcccattaatcttttaattgaagcaattgcgtcaggatttgtttctaattgtcttttagcagcatctcctacgatttcttctccgtttttaaaagcaacaacagaaggtgttgtattttttccatttggattttctaatacaactggcttaccattttctattatagaaacaacagaatttgttgttcctaaatctattcctaaaataatttcttttgccatttttatactcctttaatgtgtctaattttgttttttaatatcgattaaattcatatgatagcaaaagtataacataaaaaatggcacttacaagcaaaaagtgccacttttttattttcttaatttttgtttaaaatttcctaaatttttacttttaagctaataaatttaaaatttgcataaataaataattaaaaccaattcttgaatttgtatgatttagtaataaatcttcattatttttagttaataaaataacatccgatcttttagccatcatagaatctttatttgcagtaaacaatatagttttaatattccctttttgtttaatttcggtaaaaattttttcaatattaggagttagcgaagaaaaggaaaagaaaatgcataaagaattttcatttgcattttctgttcattttttttgaacatctaaatcaaaagaataattaacaaaataatttagtttagataaatagtttgcataaacattaataacagctaaattagctccacgtccaaagagtaaaatgtatttataacgctttaaaagttctactgcttttaagatggattcttgatttacttcaaaaatatagtcaagatttgattttattaaattatgatattgtaagtatcttgaatttttttccaaaggttttttacaagcatcagaagagactccataaaattttaattgttgttttaactcaggtaaaaaatctttaacacctttaaaacccaaatgctttataaatttagaaacagaaccgtttgagacatcagaatgtttagaaattaggccaattttcatagtgtctatattatttaagttcgatagtaaataagatgcaatatgcgaaaatactaaattatctgtattgttctttacatcttctaactttttaagaatattttccataaaacctctattaatatctaaattttagcccattttttttctatattaaaaaaataatataattagcaaaataggtgctataaatttaaaatattaaaacacttctttttctttaaaacaagcatatatgctgtttttaaaatcttcgttttcttcaaaattgtctactttttcaaaatcatataatgcaactgtaaaaactttgtaataaataattagatagtttctaaaatatgtaaaacttaaagttcaaaaaaagctaagaacattaaaaataaaattaatgttgttgtaaatagtttcacatttaaataaaaatttaaataaatatgaccttctatttttatgaatttaaaaattacaaattctaaaatagtttgtaaaaaaaccattgatccaaaaacgcagatattaattagtaaaaatgaatttacaatagtcattattaataaatttttgtacaaagacttaatttcttctaaataatttaccttataatctcttatcctataatcgtttgcaaatgcatcaatttcttttagtgaatacttttttatacttacataacttgttaacttaatttttctaagtaaacttaataatacagaaccattataaacgtagtcaaattttgaaattttcaagccctttttttctttaaattcttcaaattctgttcataaattatttttaattaaaaattctttttgaactaattgagtttcaaaatgtaaagacaatccttctaaataaaggttattttttctaaatatttttttactttttcaagcaaaaaaacaaagaaaatgaagataaaataaaaagtactagtggaaaaatttctacaaatcaaaaaggaaaattctcagtttttaatgcaatgtaattgtttaacacataaggtttaacatttaagtctaaaatcaatccaaatgataaaaaagccaaaacaaaagcaaaaagattgaaacaagtaaataaactaatttattttgttttatttttcaattaaaaaaaagaacgtatttaaaaagtggtttattagaaatatatttaatcataatatatttgagttgataattgattgcgatattagttacaagagaaattccagataataaagtatctaatgaacttataagtgttcctaaaggatttgcaaaagaagtggtaaataatatagctcttttagttccaatggttgtagaaaattttattattggtttagaagcagaaaaaaacgtttttttaaatactacttttgatagtgcttttgaaaaacaggaaccccgcttaatttctcaactatttttgaagcaattatctcttttaaattttgtgtaatatatttaccaaaactttaacagcagagttttttgtagctaaatttaaaatgttgtaaataaaaatcaaatcagattttttagcttttaaatcttttttaaagttagttttaaattcttcaaatgtcatcgcagaaaatttgataattttttcatattctgtagagtttctaaaactttttatcctatttaaatctacttccattgctttttgtgattcaaaagactcatacacaaaaattgtcattattgaaaattgtaatgcagggcttactgcgaagggaatagtagcaccaaaagttcagaatgcagcagcagaataagataaaaataaggctcaagatgcacttgctaaagtttcagaaattatattaaatactttattagcaacatacaaagattgatatttatttaaaaaatcatcaaattttatgatactcatctttgcttcgttttgtaattttaaaaattcagcttttatttttggatcttttaatgtttgttctattattttttcttgttctttttgagataaattattgcttgaattattattttttacattattatagtaatttagttgatttaaattattaaattcattattcttttgaactttcaagctattttctgttgaaatttcttcattttctgttaaaaaatttggatttaaaaattttatatattgagttctaatttctgataaattaatttgtttattttttattgaatttaaatttttgtaaaattcatttttaaatttattcttttcatatctattattgaaattttttaaattagaatttaacaaattttcaatttctttgtttttagaaaaatcaacaaattgaacaaaatcttgcatttttttaaatttttgatcaaattcattagctcaatttaaattttccgattttcccaatggtatataatctgaaattacacctgaatctatcatcattggtctcacttgcgagagttcaggattttgaccaacattaacattagcatattgatgtgcaggtgcaacaatacttgttatttgagatacatttcctatatcaagtaatgttttttcataacttttttcaattaattatttataattttttgctatttcatctagttgttttaattttagctctagaattcctataattttctgttttaacttcaaataagaaggattttcgataataatatcaaaaagattaaatctattataaggagtataaaagtacaatttttgttctttttcttgaaagaatttaaaacctgttttttccaattctaattcttgttctttgttaattaattcagaatctattattaaaaaattttcattttcaaacatttttaatttggataatattgttgattgttttaaataaaaaagaataccatttatagttgtaattttaaagtgaattgatatatcagttgtattaaaaataaaagtatcgaaagaatattcaggatctttttctttctttctttgttgttcaaaatgttttgtctgttttttgcataaatatttctaaattgctttgtgcagtgtcgaaattttttacataattaaattgataactactcccaattaccatttttttatagatcaattgttaaagtttaaaacatattttttattcggaattcatttatatataataatacaaatcaaacaaaaaacaatagaaacaagaggcattcctagagctgtaaataaaagctgtaaaattgcataatttgtcatttgatcagaattgtgattagctatataaagaattaaaggtattattaaaaatggaacaatacttaatgcagaaacaaaagatgcaaagtaaaaaaaattaaaaatataatttaatcttttattttcaaatttacaatttacaagtctttttcttcaaatattaaatttatatctaaataaaacctcatccaaaaaatcttgtggtattttgtttttttatttttcatttattaaattatatattaattaaaattctagttttccataagatctacaaattttttaatattttttactttattttctatactcaaaattaaaaaatttaaaacatttttgtatgttattttttctatattaaattcaaaaacatttaatgctccaaaaggactttcagaaataatgttttctttattttcttcaacaaatacaaaattattttcttctaaaattcttcttttttcttcatttatttttgatttattaaactctacagtcactatcattttataagatttgttaagctgaggagtttgagtattttttaaataaaatacaaaacctttatctgttgttaatttaaaagaactttccatatatgtataattaaaagaataaactgcagaaaacatcttttttaaattaagatcaatattacgtaatgagtttattttttcttttttttgagtaattgtaatctttcaatttcttgtgtttcaatactttttataaaagaaaaattgtttactaaaatatcgctaattttcttcatagattattcattaaaatctaatagaattttctttttcttagtttttacaataattgaaacaaaaattaaaaaaattattaagataagaataagagaaaacaaaaatataacaattattttattgctataattgtccaaaaaataagttttttattttctttggattagtgaataaacgcaagataatagtaagaattaaataaaagcaagtcgttagaattaaagagaaaatagaaactaaaaagacaagaaatataatatatttaattttttagattcaaattttattaatcttcatctcactgatgcagattttaatttattataaatctaaaatattttctataatatcaatttgatcttttaaaaacatattttattaattgtttatttttactttaagaaaaattaattccgcttctgtattaatacaaacaaataaagtttttttcagttgctcattgctttctaattcattaatatcaactttaaatttaagatatgaaataataagtgaagaatatagataaaattcaattaagtctgtagaagcaacttgtcattgaagaattccaaaaattaaaaatgaaaatgcagataaacaaataaaaacaatttgaaaattataaagaaaatagagatgttccaatttagaaattttatttaaataagaaatgtaaacagaagacacaattatagaagtaatactgctaattaaaatagcaaaactaattacactcactaaagagtaaatcaaaatatatttatgttttcttttaaggttaacatataaaacttctgaaaaatctatttttttagcaatatttaatttaaaagtttcagctaactcattcctgcacatagtttcgaataaaaaatctttatattttgtttttcttttagtgattgaaaatcataaactagatcaaataagttcaaatcaagaaatatttaatttttctttaattttataatcttgaaattaattaagaagttgatgattaattaaaaaatccttcttttttcaagaaacttcacattgcaatgataaacctcgcagtaaaagattgtttcttttaaaaacacttttatttctaatgtaaataataattataaaaaataaatttataaatattactgctagaaaactaagaattattttgttgatttttgaaataatattatctatatttgttaaattaagatcattgtttaagtaaaaagtttttagaacaaattgaagaaaaaatatttgagtaacaaataaaataaaacaaataagcaaaaaagaaagtgttaaaaaaacactttatttttcttaagtttatagtttaaaaaattaacatattttatagtgtctatcataacaaaagtttaaaaatttttcttagtttttaaagcaaaaatcaaagtgtttatagtatttatttttgaaatttcagtatctatagttatataaaaggggctatatattttacaaaaagtagactaattaaaataatttttttatgttaatttagattgcttttcttttttatataatctttatgcattttatataatgttttgcactaattgttcttatattttataacacaaaagaattagtaaaaatttcattgcaggctgattttaaaattgtattgtaggatttagtaaaattttttatcttgtttaatttttctttattttttttattattttaataaattataaaaaattataaatagaaattatatttaagttttaattttttctcattttttgtaaatagatttttttattacttaaatatttttcaaaattatttttttgtttacaattttatttactctataacttaaaaggacaaactatgtataaaaaattttcagatggaactattgaagtaattactggtccaatgttttcaggaaaaagtgatgaactaattaaaaggattagaacattatcttatgctaatgtcaaaactttagctgtaaagccaagaattgattctagattttctacaaatgaaatagtttcccgtgctggtactaaaattcctacatatgtagtagaaacagtggcagatataaaaagtttatttgaaaaatcaaaatacaaagcaatcgcaatagatgaagctcaattttttgataaagatttagtaccttatgttgaagaattagctaatcaaggaattagagtgattatttgcggtttagaccaagattatttaagacgtcctttcggagtaatgcctagtttattagcgatggctgaacatattacaaaattgcaagctatttgcgtaatttgtaaaaatgcagcttctacaacttttagaactattaagtccaataaattgaaagttattggagatttagatgaatacgaagcaagatgcagaatttgtcacaataaaggattaaataatttagaaaaaaattaacaattttatttttttctgttataatttaattaatctgcaagtgtagtttaatggcagaacttcagccttccaagctgattgtgagggttcgattcccttcacttgctccatatcaaatttgaccaatgagctttttgctcatttttttatattttttacttgtttttttttttttttttgattaaacttttaagtaattgagctaaaaaataacaaaaaaagaaaggaggtgagaaatggcagataaaaatagacctagcacaccacacaataatccaaatggtgctggttatccatctactactggaaatcgatctggaacaggaagaggaaacaacaatccaagaagataattttatatcttaaaaacaaaaaaatagctttaaatgagcagatcctcttttcttagaaaaatagaaaaggggattttttatgaaatattcattagaatttaaattagaatgtgtaaaaaaatacaaaaaaggaattgaaattaaaaagcctgattttgctaatacaagtcaaaaaaattttttaaatcaagtaaatttttgagaaaaaatttatgacaaattaggagttgaaggtcttaagaaaaaaccacgaaataaaaagtgaactatagatcaaagattaaacatagttaaaagatttttagctggtgaaccaattgttaaaatttcacttgaaaataatcttaatccaagtcaaatatctttttgagcgaaaaaatatttagaatcgtgaattagtggtttagaattaaacaaaggaagaccactaacgaaatctaaaattcttaatgataaacgttcaaaagtttcaaaaaattttgacagtaaagatcaattaaattcttcaatatcagtatatgaagaacttaaacttcttgaagaaaaaaataaacattttaaaaaagagaaaaaaactttgaaaaagaaattaagttcttaaaaaaaggaaaatgaagttctaaaaaagtgaaaagccttgatagagatctttgactcaaatcaaccaagacaagaaaaaataaaaaaatttataatagagtaaaagctgataaaaatcttcgattaactcaagtattaaaagagttttctattcctatatctactttttattatgaactcaaaaaagaagattttgacaagaaaaatgaagaaattataagccaaatgaagcttatttttgaagaaaattaagcaagatatggaaaaagaagaataaaagctgaacttaataatagagactataaaattggatttaaaaaagttcgcagattaatgaaaaaattcaatctcaaagcaatttgttctagaagaaaatacaaatcttacaaaggaacagttggcaaaattgcagacaatattttaaatagaaattttgttgctactcaaccaaatcaaaaatgaactacagatgtaactgaatttagaggaccatttggaaaagcatatttatcgccaattttagatatgtttaatggcgaagttattgcttgagatttgtctacaagcgctaataaccagcaaattagaaaaatgcttcaaagagcattttcaaagcacaaaaatcttgaaggtttaatttttcgcagtgatcaaggttgacaacatcaacatagacaattttcagaaaaattaaaacaaaaaggaataattcagtccatgtctccaaaaggaaattgtttagataatagcgttattgaatcgttttttgggacattaaaaagagaatgtttttatggtcgtgaaaaagaatttttaacttttaaacaacttcacaaagcaattgcaaattatatttattattacaatcacaaacgaattaaagatagaataaaatgaatgtctcccattaaatttagggaaacattcatttcaaattataattaatttaattatttaaaattttattaagaaaagggtatcacctcattttttgggctcattattttaaaaacttaactaaattttaaaagtaaatactaagttaaaattaaaaaatccttcaaaaatgaaggattttggactgttatttcgttatattttttagaatatcaactatatcgtatgaaggaaataaagtaatattttgattttttggtataaaaaaatagttataatctgtcctgtatggcctacaaaatcttttacatctcttgagtgtttaccattatttcactctgtatcaataatatataatttttttgtttttttaataaatttaaaaaacggtttcagccttcaaccaccaccaccatatctagaatatgaaaaacctttgtaataagattttaatatgtatatatctttactagaaaaaacctcttccattgtcacttgtcaaaagtatctgaaatatatttatttaatgttggtatcactttgatttttctaatttttttatatattgggaattttttataaccataacttcgttataagaaaaaggaattttcaactttgaattcttttcttcttcttgtttcaacaaattaatttcttcggaagtcagatagcctcgatcaaagattttatcactataatttgacagtcagtaagttttggatttaaacatttttaaatattgatttcattgttcacttcggatgtctaaaaaattcttatcaaaataataaattttttcatttaaattttctttatttttaagaatttctattttattatccaatacatctttgtttttatttttatcattagaaacattattattacaagaaattaaagtaaaagtagaagaaattaatgttaaagaaaaaatattattttattgtattttctaattttaactattatttaaatttaacacctttttattgtataagtaactgctcaaatatcttttatataattatataattttcaaataatgtacttcaattttttttataaaaattatataagtattcgagtctgtgatttgaacttttcatatttttttgtttttttgtttaaaaaacttccaaaaagaaggaaaaatagatggattaatttttcttgatactttaaagaattaaatataagtaaatatagtaaaatattatcaaattaatttttaggagaagatatggaaacatttgaatcagttgttatagataaaattggttttcacgcaagaccagcttccaaaattgcttcaatagcttctaaatttaaatcagatattaaaattatttctggtggaaaacaaggaaatttaaagtcaattatgaatataatggctttaggtattaaacatagtgcaatctttcaattagaaattgaaggagaagatgaaaaagaagcaaaagaagcaattgttcaagcaatgatagataacgaattaatttataaaatatagaattatgaagaaaaaagaagaactttcacatttaactgaacttcaatatgaagtaactcagaatagcaaaactgaaaaaccttttgaaaatgaatattacaataattataaagaaggactttatgttgatatagttgatggaacacctttgtttttgtcaattcataaatacgattcaggatctggttgaccagcttttacaacacctattgatttagaacacatagttgaattagacgattattcttataaatttgctaaaagaacagaagttcgttctaaaaaagcaaattcacatttgggacatgtttttgatgatggtccaaaagaatttggtggtaaaagatattgtattaattcctcttcattaaggtttattcccaaaagtgatatggaaaaagaaggttattcagaatatttaaaatattttaaataataaaaaacagagtttaaactctgttttttattattgatttattaaatttaagattttgtttttcttttatagttttttttatgattattcatttttttagaaaatttattgtttcttttttcagatagatatttgtaaagaattaaggtaggaataattaataaaatagaaataattataataagtactctgagtcaagtataaccttgattagtaaggggataagtacacattatcattcaaaaagataacgctaatactgaattataaaaaggaaatgaaaattttgtcattcttaaatagtagaacaaaacagataaaagagttatggctaatcaatagacaaaccctattgaaaaaaatactccaaaacttatactaggaactagttctttagttacattatcatatttaacatgtatttcaggagataaaagtaaaaaaatcaagagaaaaggaataataactaataaaaatgaaaaaattccatcaggtatttttgttatttttttattcattattttcgatttttgcttttataaatttaataaggtcttcaaagtttaaagtattagaattttgttgcccatattctctgtaggtaatatttttgttttctacttcttgatcaccaacgataatttgaaacttggttttttgcatttgagcttctctaatttttttgtttattctttcatttctatcatcaactgttacattaaaattaagctcttctaattttttagcaatttcaagtgcaaaatcagagtgtttggaattttcaataggaattactacaaattgttttggacttaatcaaaaaggtaaaattccttttgtttgttctaataaaatagaaacaaaacgttcataagttccaattaaacctctatgaattaaaatcggagtctcttttgcattatcttggtttataaaagaaatatcgaattttttaggtagtaaaaaatcaagttgtaaagttgaaattgtaatttcatgatttaaaactgttttgatttgaaagtcaatttttggtccataaaaagcagcttcaccaattttttcttgatattcaacaccaagttcttttaaaaccttttcaagatctgattcagcttggttccacatttgatcatcatcaaaaaatttttctttattttctggatctctttttgaaaaagaaacataatttacttcaattttgaagaattttaacacttcggaaatcatttggtacagatgtttaaattcatctacaatttgagttttagctacaaaaatatgtccttcagttagcaacatagatctaactctttcaagaccagttaaagcacctgatttttcataacgatatagtcttgattgttctgaaattctataaggaagctcacgatagctttttttgaaagtgtcaaacaaaataatgtgatgagggcatgtcattggtctaggaattagattttcaccttctactactaaagcaccaaacatatcttctttataatgcgcgaaatgacctgaaatttcgtataatttttgttctccaaagtgtggagtaaacacttctttaaatccatattttttgtcataaaacaagattttttccttgattttattaacaattttcattccatcttctaatcaaataggaaaaccttgaccaaataacttattaaaggtaaaaagttttaattctttacctaattttctatgatcacgttcttttctttcttgtaatatgtgtagaaattcttctaattcttcttttgtatctcaagcagttccgtaaatacgagttaattgttcattttctacttttcctcttcagtatgcaccagcaatactaaggagtttaaaatgcttgatttgcttcatattttctatatgtccaccagcacaaagatcttcaaaaagatattcatttttagttggatttactatagaaaagaaggttatttttctattttcggaagtaaatttatctaataattcttttttgaaaatttgtttggaaaaatcaatttgtgttcctagagtttgcttcataacaaagttattattagcaagtttttgcatcattttttcaatttttatcaaatcatgttcagataaaggatttacaaatttaaaatcataataaaagccttcatcagtagcaggcccaaatcctagttgaacatctggaaatagtttgattacagcaagtgctaatagatgcgaagcactatgatttagttctttattgatgttcttcattttataaacctattttttgtttaataaattttaggtgttcagaagctacagctttagctctttctttacctaattgactatatttttctatattatctttaactttcttgtattcactttgtatgtgaattaaaaattctttaactattaaaccaacttcatgtttgagatttttgtagtttttatctttaaaaaattccaaagttttttccatttctcattcttttagtgaagaaaaaattgtaagtaagtttttaacacctggtttatcatcacttaaataaattttattttctgaatcagtgatagctttttgaatttttttgtaagctaattctggatcatcaagtaaaaaaatggctgaattaggttgctgagttgatttagacatttttttagtaggattagttaaagacataattttacctccaatttttggagtcataatttcaacttctttaaattttgttttatatttattatttagtttcaaagctaaatttcttgttaattcgatatgttgtttttgatctattccgacaggaacaaaatcaggattataaagtaaaatatcagctgccattagtgttggataggtaagtaaaccagttggaattgtttcagttccgttatcagttttaattttacttttatctttgaattgcgtcattctagatagttcacctatagacgtgtgagtttgcataattcatgctaattcagaatgttctgcaacatcagattgataaaatattatagatttttctgaattgattccacaagccaaataaaatgcaaaaatatcttctttattttctctaagctcttctggtttaatatcaactgtgagagcgtgtaaatctgctacaaaaatataggattcatattcttcttgcattttgaccattgttttaatagaacctaaataattacctaaagtaagttttcctgtggcagtaactccgctcacaattctatttttcataatttattattttagcataaaaggtataatttaagataaaaaggtttattatgagaaaagcatcaaaatttatttattattttttaaaaattattacttttaatcaaattacaaaatattgggcaaaaaaatacaacaaagtcaacacaacttttattacttccaataagataccttttagtttggaagatttgataaatttgctaggcaaagataatgttgcaaacataaacaatacactttctagagtacaaataactttgaataattccaaaaatttagatcttaataaaattaaagaattaaacggaatttcaggcgtggttttaagtcaaaacactttaaacttgattgttggaaataatgcatctacaatagctcttcaattaaaagaaaaggttttaaacaatggataattcaaattgaaacaaaaaacaagattcagataattatcaacgcttattagataatttgattgatattaagcgaaatgatagttgtttgtttgctaaagttgataattcagattttattgatttagttgattttttatccaaacaagatagaagaaaaatatctgttcaaccaacttttgcaatttatttatccaatgactctcttcagaaaaagaaggaaaaaattgaaaaagctctttcagcagatgaaatttatgaactaactgaagagtatcggacagaggtagaaaaaaagttttctaaagcgctaaatcaagattttgaagaagccaaaaaagatgttgttgatttttttgaaaaagaaattcaaaaatctgcaattaagtgaaaaaaatatattagaaaagcaaattcaatcaatgctgaaagaaacatttgaccagttcatattggtttttgttacattagcgttaaaaccgatactaaaacaatattcgcacctttgttttttaaagaagtaaatattgaattaagacaatcacttccaattttgacatctaatggagaaattaaagtaaatcaaaaactacaaatttttctcaaatcacaagaacttaataattttgagttagattttgatttttcacaagcaacaatagctgaacttgaagaacaaataaagtatttgtgacctgattaccagattcctgactttgatgacaaaattgacaaaagtgcaatgaatgacattagaaatcaaaaaattatttttcattctggaattgttttgggttttttcgaaccttcaggtggttatcttagacgttcattggaaaatataattaattacgatgatccacgatctattattaaagtagaatttaataaaaatgtttacaaaagaaacatcgaaaaagcaatttttgaagatgaattaaatgcttttttcaaaataaatcacactaatttttcacaagattgagcacatgtttcagctatattacataatacaattatttgaggtcctccaggaacaggaaaatctcaagtaatagccaatattctttcaaatattttaattattaatcgttctgctcttgtagtttcacaaaaaaaagcagctttagaagtttttaaaaacagattgggtaaattatctttgttgtgtttatttttactaaatgacaaaaatatggataaaactcagttttataaaccaatggaagagttaattaactatcttgaaaattttcaagaagctcatccgattaattcattagagattgtaaatcaaagtgacaaaacttatttaacacttttaaataacatttttacttctaattttgaagctgctatttttgtttataaagaaattagaaaatcaatgccagaatttaatgaagaagcagttgtacagctttttaaattatcaaaagatataaaattaaatccaagaatttcaccaaccaaaaaatctaaattagttcaaaatattattgaatcacaaacaaataaaaagcttactttttttcaaaaactaactttgtccaaacaaagagttgcttgacacgatgctgatataatcttgacacatttgagtaaatacgatggtgaattaggtaatattttgccccatttagataggctaaaacctgaagatatttttaatattcatagttttttaaccttcaaaaaagaagcaaaacaacaagtaaacacaccagaagaaattttccaatgacaggttaaaaaaatttataataaactaaatgattatattcaagataatttcacaacttataaaaaatttgcaaaagaaattagaactaaaacaagagatccatacaaattttttctaaaatacagtgaagtaatcaaagttatttattcagtaattattactacaccttcaacagatctttctatgtatgaaaaagaagaatttaattacgcaataattgacgaagcttcacaaatgtttttagaagaagctttaccaatcttatatcttgcacaaattaaagtttttgcaggtgataaagaacaaatgcaaccaactaggtgatttgcttctagttatggggaatatattgaagatgaggatgaaactttaaatattagttcaattttagatcacgctgttagtgaaggagtatatcaaaatcttttagataaaaattatagatcacaacatgctgcactaatgacttttaattccaaagaattttacaattcacaacttgatatcattaatcaatttggttctaaatttttaaattgtattgaagtttttaatctagatggagcttgaattaatgggcaaaatttagttgaagctgattttgtaatcaaaaaaactttagaaaatctaaacaaatataacaaaataatcttattaacttttaatgctcaacaacaaaaaacaattgaagatattatttttaaagaatatcctgaactagatgaagcaataacacaagaaaaagttttagtaaaaaatcttgaaaacattcaaggagatgaagctgatttactaataatttcagttgcttatgataaaaatacaggttgacattcaacttatgtttctaaaaaaggtggaaaaaatgctttaaatgttgcaacctcaagagctcgtgaaaaaattgttgttgttaaatcggtaaaatctgaagatattcaaagtggagcacaaagtgaagatattgcagttttcaaaagatgattaaactttttagatttaactcatgaagaacaaatcaattatgcttcacaagaggataaaaaattaaattttattacaaattcacaagataaattcttagatttcaaacaagaaattattcaagtaatttctaaaaaaattgctgatatacaaatcgtaaataattattcaataggtacaataaaattcgattttgctttatttaagaagcaaaaaatggttttaggtattattgtagataacttgcaatattacggagatatattaaaatattcaaagttttttgatatggttaaatttattgagtttaaaggctttcctctatgtgtgattaactttttagaatgaaaacttcagcctgttaaagtgcttgataaaatacaagagttaatatatgctaaaaataatttataaaaaagctttataattaaagacaattaacaaatcaaggagaaaaatgaaaattattaattttgcagagacacaagtaactcaaaatgtagttaatgaagcaggtggtgtttctctgggtgggtgaattggaatagtttttgcagttggaatcattctattcattactggtggaatcattgcgttatttgtttctagaagaatgtttgaaaaacaaattaaaaacaatccgccaattaatgaaaaaatgataaaagcaatgtatatgcaaatgggtaaaaaaccatcagaatcacaaattaaagctgttatgcgttcagtaaaaaatgctaaatagtaaaaacaggaaaaaaatgaaaacaaaaacagtaattttaatggtaattgacggtctaggactaagaaaagaaactcaaggaaatggttttgctttagctcacacaccagtttttgataacttatttaaacaatatccttattcaattattcaagcttcaggagaatttgtaggattacctgaaggacaaatgggaaacagtgaagtaggacatttaaacatcggtgcaggctttgttgttcacacagggatttctttgataaataaagcaattaaagaaaaaacttttgcttcaaatccaaaatttattaaagcttttgacaatagtaaaaaaacaaatactcctttacaaatcattggattattatctccaggtggtgttcattcatcagaaactcatttgtttgaattattaaaagctgcacaagcctatggtgtaaaacaagtagtagttcacattattggtgatggtagagatgttgcacctaaatctattttaaaatctattgagaaattagaaacacttttggctcaatttgaaaattatacaatcggttcaatagcaggaagattttatacaatggatagagaccaaatgtttgatcgagttcaattaggttttgatgctattttaggtaaatcaaatgttagttttagtgatgttagtgaatatataaatcaacaatatgaagaaaatattacagatgaattttttgttccagcaattaataaaaaccttgatttttcttcatttttaaaggataatcaatctataatttttttcaactttagaccagatagaacaagacaactaactcatttaattttggattcttcattgtatacttacaaatcagaatacaaagttaaagttaatgtttttgtttctatgatgaaatatgaaggacttgcaacagatatagcttttgaagaagttgaagttaaaaaacctttaggaaaggtcatttctgagcataatttaactcagttaagacttgcagaaactcaaaaatatgcacatgttactttctttatggatggtggttttgatatagaattaccaaaatcagatagaatattagttgattctttaaaagtagcttcttatgcaaatgctcctcaaatgtcagcaaaagaaattacagatgctttattagcaaatgctcataaatataatcttgtaattatgaattttgcaaatccagatatggtaggtcatacaggagatttgcaagctacaattaaagcagttgaagtattagatcaacaaattggtagaattaaagattgagtagaatcaaatgatgcaactttgtttatcacagctgatcacggaaatgctgaactaacagaggatgaaaatcaccaaccttctacaaaacatacaactttcccagttatgctaattacaactgataaatcattaaagttaaaagatggtaaattagctaacatagctcctaccattttagattatttagagattgaaaaacctttagaaatgaacgaagaatctctaataatcaagtaaattttaattatatgtagaaagaggaaaaaattatttttccatatacagcagataactttaataacaatttaaatgttgctattttagttaatttaataatttttattttaataattttagttgttcctatatttttgattttaattattgcagtagttaagccaagaattaaaaaaatcaccaacacttatctttattctttaagtgctggacttttgctcattgtagcaacagcaggtcttttgcgtgaagcttatgagaatgctgaaaaatttacatttcaacaagctattcaaacaggtaagttattttgggcagaaaatagtcagttttgagtagctcttttagttggttcaggtgctattttgggtgtgtttactatttttattgttcgttttttctttgttaagaaattcaacaacgaaacacattccaatcacaaggaacacaatcatgatgatcacattataaattttaaagatattgataatccaaaagcagcttgattagctattattttacttctttcacatagaacaatagatggatttattttgggttctattgtttctaaaatcagtattggacaaaagcttaattatggtttaatcataacttttattgctcacattttaatcgagattttaattatttattacagacaaattcaatatggtgaaaaagtttgaaaagccgttgtttataatttattaactactgttttattaattccaattatcacaattggtgcttttataaatagatttttagaacaagtaggttgaattttaccaattgtaaatgcatccggtggagcaattttatcttttgtggttattgttgaattagtgccagaatttattcatttaagatccggtgcaaaaaaacaatgatatttcacattgatttgatttgtatgtggaatcataatagcatctatcttactttctttccacgctcatagtacagatctacccaattcagactttaatgcacctataaaactccctacatagttatttttttaaaatagctaaattgaaataactatcttctaaggtataaattaatttttctggtttgattacaattctatattttgttttcatatcgcttttataagtgattttttcaacattagattttaaagaattagaaaaagcaactttttctcactgtccaataaatttttcaagatatatatcaaatgcttcatttcgaacaaaaatatccttgaaaatgttttccgaaacattcttaccgctaaaaagagtttctcaaaaatttatttgaattttgaaaggtatagcaattatttttcaaatattaaaatatcttggatcaggatcaaaagaaaaattaatttttacaaacaagatactagcttggatttgctgatctttatctaattcaaattcataaataaaatctttactttttttattagaaataatttctggattattttcatctttgtttagaatttctcaagctcctgaaaaattaaatttacctaaacctaattgtgtatcaaaaccattaaaagaaatatttcttttttcaaattgctttgcacttgcataaatcgcattaagaattttcaagtttttattaatgtaactttgtttagtttctgctaacatatttaacttagaagcaagtgcagcaaatacagttgctgaaagttttggatcataactagtttcaattttttcttcttttttgaaggatatttttgggataaagatgttgggttggattatgccattgttattattactaaaattagttttgtataaattctgtgtttggccaggtaaaaatttatcatttttataagagccataagttccaactaacacaatattattagtatctcaagctagttttgaattagcatctttgttaaaaatattaattaaaccttttgtataaaacaaataagttaaaaaattattttgaagatttgctggtgaatcaacatctgaaaaaaacggaacatcattgtataaatgaagcacaaattttgtggttttgggattgatttcatctaaaatcttaaatcattcatcagatgtggcaaattctttaacttcaacaatggatttaggagaaattttagtaatgaccttaatatgctctgataaaccattattagttcattgctcatctttgtattttaaaattacaattttattttcatctaaagctttatatttatctaaatcttctaaaaaattaacttcttcatataaagaagcgtaatttacttcatattcagcctcctctttttttacagctgcagacattccaagaattcaagtacttgataatagtgcaaaaattggaacaattcttgttaaaaacctcttaatttttattttcataccctttttttcttttttttaaatattttttctaaaaatgaaaaaaattaggaaaagttgaagaaaaaaacaaaaattcaagtaaaataaaaaacaaattaaggttaaatatgacaaaagaaactattttacttaaactttcaggagaaagtttagctaataaagaaaaatcacttgctatagattatgaattagtcaaaaatgtagcatctcaattaaaacaagttgttaaattaggttatagaattttaatagttgtaggcggaggaaatttctgaagaggaacttctgctgaaaaaaacggaataatgcgaacaaaagctgattacattggaatgttggcaactttaatgaacggtttagctttagaatctggctttaaaaaagaaggattaaaaactagagttctttcttcaattgacatagattcaagagtgtgtgaatattatgttgcagaaaaagcaaaaaaatatttagatcaaggaaatataattatttttgttggtggaacaggaagaccttatttcacaactgatagtgcttctacattgttcgctgctgaaatgggagctcgtaaaattttagttggtaaaaacaaagttgcaggagtttatgatgctgatccaaaaacacatccaaatgcaaaacattttgaaaccctcacttatcataatgcaattgagaaaaatttaaaagttatggattccacagcttttacaatggctcaagataatgatttagaactattaatttttgatatcaaagaagaacattcaatagttaaagtaattaatggaaacataaaacacacaaaggtagtaaaataataatatggaaacaaaattagaacttaaagattttatagaaataataaattcaaaatcaaatcacatttttcaaaaattagaaagaaatttatcaaaaattaatatcggaagagctaatccacaactagtttcttatttaaaagttgaatattatgactctttaactccaattggtgaaattgctgctattagtgttccatctcctcaacaacttcttatcaaaccatatgatcaaaatgtaactaaaaaaatagcctcaacaattgtagctcacaaattagatgtacaaatccaaaacgaaggacatcaagtaagattgattcttcctgagttaactacacaaaagagacaagaattagttaaaagcattaaaaaatttgatgaagaagcaaaagttgaaattagacaagtaagacaagaagtaaataaattggtgaaaaaagaagaatatagtgaagacgaggaaagaagaattcttatcgaacttcaaaaacaaattgataaaaaaattcaagaagttgataaagtactttcagaaaaatcagccaatttaatgagtttttaaaattatgctttcattatttaaaactgacaaaagtcaaaaaataataaaaaaatcatcaatagcaatattgatagttttttttattttacccattatttttatcacttattacgcaggattacctggtagaattattggatttataatttatttttctattttttcttacggtgcttatgagatttttgcaaaattaaataaaaatgtagttattaatttacttgttctgattaatattttttgtatttttattcttccttttaatgagtttagatttagtatagaaactggggatgtgtctttaaattccttcattttaatacattataaaagttgagaaaattacttaattagttttggtttagtgttagtttgtgctttatttgaacctatagaatgaaggcaaagaacaagaaattttattattagattagttttttcttatttgataggaacattcacaaaatttttattttttattaatataaataaaattgaattattggtagttttaggtttaattgcttcattttatgatgtttttggttatttttttggttcttgattaggaagaaaatgaatcaaaaaaggatttagtaaaatctcaccaaataaaagctgagaaggagtattttttggatttttattttctgctacttttgttgctttagccttttattttattccttatttttcaataaattactcaggtgttcaattaagtattttaattggagtttctttctttgctttaccaatagcagcgatactaggtgatttactattttccttcataaaaagaagcctaaatatcaaagatttctctactttaattaagagtcatggaggagtttttgatcgttttgattcaacctttttagttgtaataattttttcaataatttcgccaataatttcccttttctaattttagaaaattgataaaatgagtaaactatgaacgataaccaatcttttatctctttttgcaagaatattaattatgtcattccaagctatttacttgaaacccaagctagtttagaagaaataatcacaaaggattcaaaaaaatatattttaaaaataaaaagtttgaatatgttcaaattccaagattttattaattttcagcaaaaaattcagcaatctttttttcaaaaatttaattataaaattctttttgaatacgaacaacaatattgtgaaaaagaagaatttttaaaatatattaattttatttatcttactttgtacaaaaaagaagacttttttaatcaatttcgtttacaaaataaagcacgtgaattttgattttattttatggatgaagaaattgccaaagatttagaagcaaaaaaggataaaatactttctttattaaaaagattcggtttatcttttatcgatatcaattttgtagtagattacgaaaacattaaaaaacaagctttagcttttcaagagttcttaaccaaccaaaaagaagaaaatcttaaacaagctcaaaaagaagcacaacaacaagtcaaacctttaaaaacatttagcagaacaaaattttctaaatcaaaaaaatatgttcccttaaaacttaaagaagttagaacagcaaatgaacaattcattgctattcaaggtcaaatttacaaacttgaggacaaagttaccaaaaataaaaatgttttaagaatgataaatattagtgattatgaagaagcaataattattaatcacttttgcaatccagagaattttttggatttaaaaataggtgattttattcatatatatggagaaattactaaagatttttacacaagagatattattgttaaatccgataagatagaaaaaattgataattttttccctatcagagttgatgaagcaaatacaaaaagagttgaactatttgcaagaaccaaaatgtcaacaatggatggagttacgaacgctcaagattatgtgaaaatagcaaaattattaggacatagtgctattggaatttctgatctcgaatctgttcaagcttttcctgatttttattttgcttgtaaaaatgcaaaaattaaagctatttatggttcaactttttctactactcattcaaaaatttttaaagttttaaatcttagacaaaatcaagatttagaacatgcaagatatgttgtttttgacttagaaactacaggcctttcacctaaatttaatgaattaattgaatttggtgctgttgtttgacaaaatggacaaattttagaaaagcatgaatttttgataaaacctaaagaaaaaattccttcatatattagcgacttaactggaattacaaatcaaatgatagaaaatgaagcaatttcagttgaagaagcagctatcaaaatcaagcaaatttttcaaaatagtattttagtagcacataacgcaagatttgattatggatgtttagttgagttttttaaagaacttgaattatatgaacttgaacaaccagtaattgatactttagaagttagtaggtttttagcccctacacaaaaaagacataatcttaaagaattggcaaaaaatgcttcaattcattatgatgaaaccgaatcgcatagagggggttatgatgctgaggttttagcaaaagtatgagatcagtttttaattaaattaatagaaaaaaacattaaagatttaaatagtttgaatcaagttggttcaaatattttggattttaaaagaagaggtcttttttctaaagaaattagagttattgttaaaaatcaacaaggattaaaagaacttttcaaactagttagcttgtcaaatacagataattttctttctaaaccgcttcttttttatgacaaaattctaccttcaaacaatttattatgaggaactagtggtttagattcacaattaatggaaattcttttttataatcatcacaatgatttagaaacatttattaaaaaatttgactttatagaaattccaactccttcttcttttattcaccttattaaaagaaataaaataaaaaaagaagacattatcaaaggattaaaattagttattgaactagctagaaaacacaaaaaacttattgttgcttcttcagagccaagatatattaataaagaagacaaaatttttcatttggtttacatttatgcaaaaggtgttggaggaaaacctcataatcttttcggtggtgatacagataaaaaagaagatcacatttttcctacaaaatattttatgacaacacaagaattaaaagctgagtttgcatttttagaagatcaagatttaattgatgaaattgtagtaagaaatccaaacaaaatagctgatttagtagaacaagtacaagtaattaaagacaaactttatccaccaaaatttgatgattctgcttcaaaaataaagcatttagtctatcaaaaagcacacgaaaaatatggagaaaatcttccagatcaaatagctttacgaatcgaaaaagaactaaatccaattattgacaatggatacgatgttgtttattgaatttcaaaagaattagtggataaagctaaatcagaaggtcaaaaagttggctctcgtggttcagttggttcttctgtcgttgcttatttaatcgggataacagaagtaaatccacttgagccgcactatgtttgcaatcagtgcaaaaatgtaaaattttcaactgattcaaatgtgttatctggctttgatttaaaagacaaaaagtgtaaaacttgcaacattttatatgataaagatggtcaaaacattccttttgaaacttttttaggattcaaagctgataaagtaccagatattgatttaaattttgctggagactttcaagttcaaacacataattacattagagaattatttggagaaaaatttacttttagagctggaacaattttaggttatgcagaaaaatcagctttttcattagcgaaaaaactaaatgaaattcaaacacgattgtatttaaatgaacatccaaatgaatatgaattttcaatgtattcaaacacttttttagattttctagctacaaaaacaagtggagttaaaaaaactacaggacaacatccaggtggaattattgttattccaaatgatttagaaattgaagaattcacacctattaactttccagctaatgatgataattcagattgaaaaactactcattttgactttgaaaatattcatgataatgttctaaaatttgatcttctaggacatgatgatccaattatggttcgtgaattagaaaaattaacaaatacaaaagttgaaaatatacccaaatcagatccaaaaataattaaacttttttcttcattagaacctttaaatatagattcaaaagaccttccaggagaacaaaatggcgcacgaggattacctgaatttggaacctcttttgttcgtagaatgcttaacacagcaagagtagaatcattttcagatttaataaaagtttcaggtctttcgcatggaactaatgtttgacaagataatgcagaagccttgatttcacaacataatttaactcttcgtgatgtgatttcttgtagagatgatattatgctttatttaataaacaaaggtgttgattctcttgtttcttttaacattatggaatcagttagaaaaggaaaatcaataacagttgaacaacaacaaattctcgaaaaccataatgtaccaatttgatatattgaatcacttaaaaaaattaaatatatgtttcctaaagcacatgccgcagcttatgttttaatggcttgaagaattacatattacaaactttattatcccttagctttttattctgtttatttttctattagaatcgattttaaaaatattgatgctttacttttaccaaaacaacaattatctagtcaaataatggctttaaaacaaagagaaaacagcaaaaaagaagacaaattatctgaaaaagagaaaaaattaattcctattttagaagtagctgaagagttaaaagctcgtggttttgaaatagaaaaaattaacttaaatctttcacaagcaacacaatgagtaattaatgaagaaaataattcactaattccacctttttcttcactagatggaattggagaagcaaatgcagctaaaattattgccgcaagaacagaaaaatccttttcttctattgaagattttgaaaaacgtgctggtgtgaattcaacagttattaaaaaattaaaagatatgggagtttttaaagatcttagtgaaactcaccaaattactttgtttgattactaataaataaatttaataattctaagttgtataataagaatatggaaataggacaagtagttgtttgtattattaaagaaattaaagaaaaatatttttgaacagatatgccagaaggatatcaaggtgttgtttttgtaaatgaaataagcaacaaatttataaaggatttagcagcgactaattttgaaattggccaaaaagttaagttagaaattttaagcattaatcatacaaataaaaaagcatcactttcttttaaaaatgtaaacccagattttgatatacaaataacaagtacaaacacacacaaattagtaactaaaaaacaaacacaatccactaagaaaataaacacatatgtattacaagctactttaaatggttttgacaatttgaaaaaagcagctgataaagaaattgaagaaaaatgaaaatcaatctcatcattgaaaaaaaattagatacagaaataaggcgtattagaaagcaaaaaaagccaaaattattaactagttttcaaaataaaatcaagacatttcacgaaattatccaaagtcaagcttcatctattttaaagaatttaagctgactagattttcacaataacattaatcaccacgaacttattgaaatgaaaaagattgtaaaaaaattgcaatccaaaaaggtgaatgttttagttgttataacatcagccaaagtttttttaggtattaaagcagctattgattttgtctttggaaatttacctttggaatccaaaaataaaaaaaatatggaagttatttttattgaaaattgtttatcttcaactgagttagtgcaaaaactcaattatgtcaaaggtaaaaattttgcaattaatttaatctcaaaatcaggaaatgactttgaaattcatttagcttttagattttttaaaaatttattaattagacaatttcacgatgatatagttgatagagtttttgtaactacaactttaaatcatcaaagtgttctaaaacaaatggcaaatttaaataacttcaaattattttctgttgaaacaaatactgacgaaagatttcaaattctttcacctattggtttgtttccgatgttgtgtgcaggaattaatattaaaaaactcattcaaggggccgcacaagcaaatgcagcttttaatcaaccagatgttcgaattaatttagcttatcaatatgcagctgcgcgctatttactttataagaaaaaagggatatcagctgaaatcttaataggatttgaacctttttttgcttcattaaataattggtgaagacttttatttgcttcatcaaatactaaattaacaaataatttaaataaaaacaataatgaagaaaaaatacaagatttgcaaaaggaatatgaagattttgaaagtttaaatgaagaaaatacaatagaatttgaagacttttctacttcaacatcccaaacccaaactacaagtttgctgcctgtttcagcaatttttactactgatatttatacatatgctcaatttttacaagaaggatcgaaactattttttgaaacattaatgttcatcaaagaaccaatttatgatattttaataaacgaagaacaacataatattttcagaaaagatcaacttgataaatatgcacaaaaaaccgtgcatgaagtcaataaagcttcattttgagctactgttgatgcacattcaatttctggaaatataccacaaatcattttaaaacttgaagataacagtccagaaacatttggatgattagtgatatttttccaaagagcttgtattatgtcttcctttcttttgggtactgatccttttgacgaaactatttatgaaatttttagaaaaaaatttaataatttgttagaaaaagaacaaaaaatagatgatttttaacagatttaaaaaatccttcttttttataggttttagttgaaaaatttaataaaattagaagaaatatttatggataaaggatttattatgttaaataatacaacagaagtaaaaaacaatattttatttgaaattcatgatgtcgattttgattgaaaatcagaaattcaaaaaccagaatatcaaaaattaattaaacaaaatcatgaaaaaattaattcagttttaaaaggaattcctgaaaaactagattttgaagggcaagattttttaggatgagctaaattttctgaatatgattgactacaaaatacacaatcatataactatcaagagctaataagaatgcaaaaaattaaaaatagacttttagaacaaggtgttgaattattagttgtcattggaataggtggttcatatttaggtgcaaaagcagcaattgactttgtaaaaggaaacttacctcatgtggataaaacaaagtcattggaagttatttttgctggaacatctttatcttcaactgatttatatcaaaaattaaattatgcaagtactaaaaaatttgcaattaatgtaatttcaaaatcaggaactacaattgaaccagcaattgcttttagagaatttagaaagcttttggaactaaaagaaaaagaaggtgcaagagatttagtttttgtaacaacagatagacaaaaaggtgctttattagaaattgcaaaagcaaattatccaaatgaaaatatttttaaaattcctgatgatatgggaggaagatttagcgttttatcagctgttggatttttccctatgttatgtgcagggattgatgttcatcaagtaattagaggagcttcattagcagctcaaaaatattcacaatctttagatatttgaaatttcaatccagcatatgtttatgcattagttagatatattttatatagaaaatttaacaaacaagcagaaattttagtaggttatgaaccaaatctagcttattttaatgaatgatgaaaacaattatttggtgaatcagaaggaaaagcaaaaaaaggacttttaccaacttcagtaatttttagtactgatttgcattcacttggtcaatttattcaacaaggatcacaaattttctttgaaacttcgatttttattcaaaaacctatgtataacctagttgtaagtaaaagtagacaaaatcaagataatttaaattatttagctgagaactctatttcaattcatggtttaaatgaaatggtttttaaagcaacattgcaagcccattcacaaacagcacaaattccgaatatggttttaaaattaaaagataacagtgctgaaacttttggttgattagttatgttttttgaaagatcttgtgctatgtcagcatttttacttgatgttaatccatttaaccagccaggagttgaaatttacaaacataatctgaaaaaaatgttatcaaaataaaaaccagcaatcgctggtttttttaataatttgaattgattctttgtagattaatttttgctttttgtaaataagcactttttacttcttcaaaagtaaaattaagaaggaaaatgaaggctaaaaagtgttcaaaaagatcttttaaatcttctgtttttttagaataaccaaattttgttgctaaataaaaagtttttaaaaattgatcatctaaatttttgctttcaacaaatttagcttctaaaatatagtccaaattgtgttcattagctagtgaactaagaaaatgaattgcatccacatattcttctttcattttttcaatattgttttttttgtttacttttcaatatttaaaagattcaatttcgtttgcgaattctccgatttcaattattaaagccatgactttttgcattgaaattttttttgaattaatttcttgatttctttgtttcattgagtttgtaaataaaatgtctaactgtttttgatgttcaaaaatatctttaaaattcatatcaaacattatactaactacaaacaaaagacaaaataaaaaaagcaagtattttcttgcttttttattggatttattatttgttgaaatcacttaaaccagacatatcaacatcttttttttgttcttcagaagcaacaaataaaggtagagtgtataatttcattttttcagctttaacaacagctggataaagcataatgctttggttaaattgagtaacatccatattgtaaagtcttcttgaagcagcaatttcattttcaatatattggcttgcacttataagatcaacaataattgagtttgcttttaagtttggatattgttcataagcgatgttaatatctcttgctatagagttcattaaaatttgttctttgttagattcattaatattgttttttgctgtttttccagaccttaattcagcaacttttgtgtatgtatcattttcaaattttaaatatgcttttgtttgttcaaataacttaattaaagtatcttttcttttagctagattcacttcgattgaactagctgagttattgatttttaattgttgggaattaaatttgttaggtcaacttacaaatcaaatatataaaaatataaaaaatccaataactgttaaagaacctaaaacaacaaggattcaaaatgaagtcttttgtgattgtgtagctacagcattaattacttcattttgtacattaggattaaaaccttctttgttttcaggtctttcttgtcttgtatctaataacataatattcctttactttttgaactaatcgttcattatttcatctgttaattgtactacttttagtatttttttttcattaattgaagtatcatttactaaaataattgttctgttttcttctactatagaataaatatttttattatttagtagactttcgagttcttttattttttctgatttgttttctagcgaaaacatttgtatatattttaaaaatgttcgaagttggtagggaacaaaagaaaactgtgttcagttgttttgtcaagaatttgagttttgttgtgaatttgtttgattatcaagactttttgcttcttttttgtttacaataaaaatccattttgtttcattcatttcataatagcgttcaaaaggaactaaaatgtgatgacatcctgtgtgtcttccacagactaatacatcatctaataatgattttgaataatatgaatgaagagttgcataaatagcaaacatatttttagatccattgttatcaataattagatgatgatcaaaagtcaatcatgttttagttgtatttccaccttttaaaaatgaaaaatattttcaatatgttcatgctaatgtttgtcaatcatctttaatgagctgatcattttcgtgctcttgttgactaattctatagttatgttttgttaaataactctctctattaaaaacaggaaaaatcataattgttgacattgcttttattaaactagcaaaataaatatgactcattttttgtatagtatcgaaattttttttaggctctatagtaagattaacttcttttaaaacattgatagaatcaatttctttataaaattctacttcagagttaaattctctatttattaacaacgtgttttcaattttatataattgatttaaattatctgactttttcaaagccacaatatcttcttgtgttttaatagtaaaaaattctaaaattgaagcagacatttcattttcatatgaataattgcttgatttttcttcattttcatcataatcagaagaaatttttctaatattttcatcgtgaaaatcgagtctaattttcttttgaaattctgaattttcaaacttaatttttttatttgaagaacctttttcgttcaattttaaatgaaaactaatatttggatgaaagttagttttagatagtaacacagaagtggatgttaaaaaaggagtattttcattgtgtatagcagttagagtttcatatctagtttctatttcttttactcattgaccattaacttttcttctaactacaactgtatatggataagattcacttttagatgttgtaattagacgaaaaaaacgacttattaaatctccatctacaaatggagttgatttatagaaaaaagaaatatttttatccaaagcaacaatatcaggttttaaatggaaaccttcttgtaaaaagatattataacgttttggattgaagtcataaaaaacagatttatatgcttgatcagaaagagtaaaacctcattttttaaatacaaaattagtaatatctttatagtttatataagaaaatagtcttctgttggatttttgaatatgatcttctaattgttgtatttgtgcttctttttctttatgaatattgttaaaatcactaatatcttttcaatattgtttgaatttggataacaaaaaaaatcctataataacaaaacaaagcaaaataattaaaaataatttgaattttttaaaaataattttgtttgtctttttataatcttttatttcttgtttaagttgacttatttttgaaaaagcttcaacaatatcatcgtataagtcttgattttccttggtaaattcttcaaaaaataattctaaaattggaataattgatttcaaaccatctttgtaaaatttttgaaaaggatcattagttatttgagttggaacaaataaagctttatcgctttttagaaattgtttaaattcttctttttcttgtctttctttttcttctaattcttctttatttttcattttttcctattaattaacatatttcttcaggatcactgtagtcaattaaatcatttacttcaatgaaatctaaagataaatatttgttgaatttgtttcagtagtagttataagctaatttgttttcaagttcaatattttctatatgactattttgcatagcaataaaataaagcaaatcagtttgtttattaggcctgtaactgacttttttaacttgaaaaaaccttccatttgctaaaaaattgatattattagctttttcagattttgtttttatatgtacaggaatcatatttaaatcattattgggaccatttaaatttttggatctcataaaatctatacttcaagccagttcactgtcttcattttcatagtcagaatacttgatttttcttcctgcaaagtcaaaagcaaattcacaattattaaaatatttttgtcaaattaattttttttcttccattttaattcccttcatactaaattatataaattataataaaagcttttagtttttgtttttgaaaaaaggtttttgtagtattatttagttcatgaacaaattattcgaaaaattaaatacattattttcaacattaatagtgttccaatcaaatgttaaaaactttcactgacacattaaaggaagtgacttttttatttttcataaatacacagacgatctttcagctaaatcattagattttgtagatgaagtagctgaaaaattaattatgtttgatcaaagtgtggaaacagaatatgctaacatactaaaagcaagtttagtaaaacaatttccaaaaaaattcatcacatcaagactggcaacacaagctatagttgaacaaatgcaaacagttttaggaatttgtaaagaaattcaaggattagaaaatgaatccatatttgtagttgcaccattaattgatgagatagtgttgtttttccacaaattcctatgacaatttaaatcatccattgaatagttgtttcaatgctcttacaataaagcaataaatttttaaaatttattacttttttgttaaattatctgaaaaaatttttgtaaaggaacaatatgacattaaaaaacgccagaaaattaggtttttttgcagcattagcaatgcttgttggttctgttgttggagttgggattttcttcaaaaataattccatccaaaaagtaactgacagtcaaggtataacatgattactagcctgagttgtaggtggtgttatttctttaattgttgcattaaacttttcagaaataagttttctgaagccttcaaaattaaatggtttatctaattgattatacagatctggagggaagaagttaggatattttacaagtttttcttatgcatttttctactatccaatcattgctatgacactaggtgtcattctttcggaagtgttagtttatttcatcggttcagccgctggaaaagatgtttctcttccttattatgcacattttttaattggttcagtgtttattcttttatatttagttctaaaccaattatcaataaaaatatcaggatgagtcgcacttatctcaacaatcttaaagtttattccattgctttttgctttaattatagggattgctttggcaaattcacattttacaaaccaaaaattaccaaacgccttttcaaataccacttttgatttaagtaaattaatattagctcttcctggcgtattgtttgcatatgactcatttttatcaattgggttatttcaaaaaaaagttgtaaatccaagaaaaacagtacctagaacacttattatttctatgattatcattgtaagtgtttactcacttatagctgtttcttcaatattacataactcaggaactatatgaggaattatctctgatgtatttgatttatcaatagcaaaaccaataaatatagtagtaactttcttcttactaatttctgttattggagttacaaatgcaatggcatcagcaactttaattcaaatgcaagatcaagcaagaattagaacagtttttggagttcgtactttagctaaaaaaatgggcgaaaccaaagctgcttgaattttattagctgtaacatttgctttttgaattttaattgttcaatttccaagtatgtttgctccatttctaaaacaagttgttgtagataataaagtagtagaaggacaatacttatatggttcaggaacagatacattgctagaatatatgtcaaatactcctacaattttcttctttgttttatatggtttatcactagctacttattctttaaaaagaaacaaaatttcaaatccaaaaaatagacataataaatatgcattccacacaatcacaattcttggctgtttagtaatattaattatggaagttgcatatatttattcactaatatcagcagtagtccaagctccatgagcaaattcaaatgcaggattttttgcaagtggaggagtatttcttccttgaatttatgcttttgttgttttcatagttcaaatacttctatttataggattaccagttgttaatttcttcttaataaaaatgtttgaaaaaagagatattcttaaacaattcccattattagtagaactttctcctaaagaattaaaagaagaaggatttgaattttaagctttaaaagaaatttaaatacttataaaaatctgtaaaaatcaaacttaaaattcagtttgatttttatttttttaaacactaaaatatattaaaataataataaaagtttttcaaagttttaaaaaaggaaatcaaatgttagaaattatagagttatcaaagattttttcagataaaaaactattcgaaaatgcaaatttaaaatttgtagaaggtaatacatatggaattattggagctaatggagcaggaaaatctacttttttaaaaattctatcaggtgcagttgaatctagttcaggacaaataattaaaactcctggacaaagaatttctgttctttcgcaagatcataatcagtttgatgaatataatgtaactgatgttgttataatgggaaatgaacaactttacaagattcaagaagaaaaaaatagaatttatcaagatgaaaatgcaacagaagctgattatacaagagcaagtgaattagaagaacaatttgggattttaggtggctgaaatgcagaaaatgatgcacaaagcttattatcagaacttaatattccaaaagaagcttggaatttaaagctaaaagatttaaaagcttcacaaaaagttaaagttttactagctaaagctctttttggtgaaccagatattttaattatggatgagccaactaatcatcttgatattaaatcaattaaatgactagaagagtttcttgttaactataaaaacatagtaattgtagtttctcacgatagtgattttctagatcaagtttgcactcatattgttgatattgattttggagaggttaaattatttacaggaaattatactttctgaaaagaatcttcagcacttattaaagagatgcaaaaaaatgcaaatgcaaaaaaagaagaacaaatagcaaaattacaagcatttattgcaaaattttctgccaatgcttctaaatcttcacaagctacttcaagaaaaaaatctttagaaaaaattactcttgaagagatcaaaccatcatctagaaagtatccttttattcgttttaatacttatcccaagcctggcaagcaaattttaacagttgaaaatctttcttatgtaaatccagaaactaatgaagttttatttgataatatttcctttactttaatgccaaatgaaaaaatggtaatctttggtgaagatgatttagtaaaaacaaaattactagatattatagctttaaaagaacagccaacaacaggaaccgttacttgaggaaatacaattaattttgactattttccgagcaataatgcttctttttttgtagcaaatataaatttactcgagtgattaagtcaatgacctttaaataatactttagaagaaaacaaagacaattcagattatcgaattcgtagttttttagggcgtatgctttttaacggtgatcaagtatttaaaaatgttcaagtaacatcaggaggagaaaaagtaagattgatgttttccaaaatgatgttaactgaatctaattttttaatttttgaccaaccactggatcacttggattctgaatcaatcgattctgtaattgaaggtttgcagtcttataattcaggacttatttttactacctataatagagccatgattaaaaaagttgctaatgtgattttagatattcgttcagatgctagctatatttttaaaggaactttagaagaatatgaacaaaaaatggggtactaatgattaaagatacaatagtagcaatagcttctggtcaagtaaatcaagcaatttcaatcattagaatttcaggtcctgaagcttttactactgtagctaaaattttcaaaggtcgcgttggaacaacttcaagagaagtaacatatggttgaattcacaataacggagaattaattgatgaagttttagttttatgatttaaaggaactaataactttgttggtgaagacacagttgaaatcaatgctcatggcggggttttaaatacaaatctgattttggaattactactttcacaacctcatgttcgccttgctgagcgaggagagttttctcgtcgttcatttttaaatggcaaaatggatttaattaaagcccaagctattcatgatttaattatggctcgtacaaaaaaacaagcacaattatctatcaagcagttttctggtaaaacaagcatttttattaatgaattaatcaatgatttgttaaatattatcgcgataattgaagtaaatattgattatccagaatatgatgatgttgaagttttaacaaccgaagtattattaccaaagctagaggctttattagcaaaatttgaaaagacaattgaagcttctgaaaggagcagaattatctttgaaggaattaaagttgctcttgttggtacacctaacgttggtaaatcatctttattaaatgcactaatagaacaagataagtcaattgttagtgatgttgcaggaactacaagagatgtagttgaagcttcctttgttttatctgatattgttttcaaactagtagatactgcaggatttagaaaagcaaagaataaaattgaacaaatcggaattaaaaaatctctagaacaaattgaaaaagcttcaattgtgattcatattattgatgcaacaaagcaagaaaatgaatttgataaattaattcaagaacatagcaaaaacaaagattacattaaggtttataataaaaaagacttaaatccttcaaatttcgacgctagtgacaaaattttaattagtgccaagcacaaagatattagtcagttagaatcatatatgaaaaaacattttgtaaataaaatatcagaaaatgaagaaattatctataatacccgttcattgtcatttataaaatctgctttttcatatcttaaagatgcttttctctctttaaaaaatggatttagtcctgatatagtaatagttgacttgactcagtcttgaaaagatttaaaaactattactggtgaattaacaagtgatagcttgttagatacaatttttgctaatttttgcttaggaaaataaacaaaaatttacaaattttctttaattttggtctaaaaatatttattttgcattatcttttatggtaattcttaaaatttttttgaaatattttctaaatttttttataatatataaatggattttatatttttataattttattattaaacttttaaataattaacttattgtgtgttgttgttattattctacaaagtttatattatttatatataatccataaccaaacaaaaaataaaagaggtaaaaacaaaagaattaatttcgaaaaagttctagttttctgcttgctttatctggattaattttttctgtcgcatttatttcatttgtaaatacaaaaacacgattagaagctactactgcatttcgaactatcgttggaataaaaactagtcaatcaggtaatatgaaagttatagatatagatatgcatttaacttctaccaaacaagaaattattttcaaaattgacaaacaaacattttttctaatagagttttagattcaattagatctacattagaaaaattcagttccgacattaaaaatagttcgtgtttaaattaatcttaatataaatcaaaaaacagaaaaacaaatagaattacaaaatgaaattataaaatcggtatcttctttatctaaagaagaacaacaaacctttgtaaaaaatatatctaattgatactcaaagataaacaaatatctaaatagcaaataaaacaagcacaacaagaaaatcaatacaaatcattagaaaaaattaaaagtaaattcttaagttactttcaagatcaatatgataaatttgctaaagaagaagcttaaaacattctgagatcttaaatcaaaagcatttactagaaaacaaataattctaaagatttattagactaagttttttaaaggttatcttttaacaaaaaaagagctttcgctcttttttttgttttttgtttttttatggcggttttatttaatttttttaatttgatttcaaggtacaaatataaacttataaaatcgttttaaaaattgattaatattatctgtttcattgctgtttaaataattaaaagatagatttgcaacaaaatcacaaaccctaataacaggagtatgccttgaatttaaatatttagttgttatttcaacatttgaaattaaaacatcattgaattcaggatttgaaattccttttaaatcagccaaaattaactcagttaaatcatagtaaccatttgatttattggtttgttgatctaaacgaagcctaatagttagtttttgatttgtatcaattttattttcaataatcaatttttcaagtgtattacgaattatttttttgatcatataatctttaaatcgcccaatactttcttttttacttagaatttcaggatttatttcataaaaatatgtagcaactaaaattattgaagaaaaatctgtaatattaaaaatttgttctttgtgctcacgctttactttagaagccttgatttctttaagatttttataaatttttatatttcttaaatgattttcaaaagctaaaaacttattatgaatttttaaatattcattttcatttaagaaatacattccagcataaacaaatacttcatcattactgtttgtgtgaaatatacctgcatcatcaaaataaaaactaataacttgttcactttgttttttagattttttggtagacattttgataaattcaaattaatatgtataaattaaattgcttgctttctatttttttattttgataataataaattaagtgatctttaaagtttttatcaacaaaagtataaaagtattgactaaataaatagaaggatttaaagaagatagattctttagtaaatgaagtagatgtcaattttatacttttatttttagctttatttaaaattatttttaatttagaaaaaagttctccttgcatttcaaaatcaaaatcttgaagattaatttgatcagtgtatttgttaaataatttctctattagcgaattagcgttattgttttttactagatcaagaaccaaatttctagattttagaaacattttagaagaaacaaataaatgcaaagagataagaataattaaagcaataaaactaatagaactaattattcaaaaagtttgatctttttgtatattagataatctcgaatcggatgcattaaatatgacgaccataattatagaaacagtaaaaaaagcaacaataactaagaaatataacaaagctttgataagaaaaaaagcttttaaatcttgtttgtttgcttcttttaaataaaaatattggtctaattcaaaatcttttaaagatttaattgcaagtttagaataatgtttttcaaaagaaaaaacaaaaataataattaaaaataaaacaaaaggcaaaatgatagtaattgctatatgagcgccagacatattacctcctattggttttattagttaatattttaattttactataataatatttttctcttttaaaaagaattattttagtaaaaaaagagaattttttgttctctttttttatttttaagctgacaaattatatttttattttgtcataaaattgttttgttatatattgaacacgagtaattgctgaacctacaacaactgcatctgcatttcctaaataaagtgcatttcttgctctgattggagtatcaaaaccaccttcagcaattaatttaatattattagcacgtcacaatggagcagctcattttaagaattcataatttttttctgttgagctttgattttgtgtttgttttgtatatccacgcaatgttgttccaatgtaatcaaaacctagttcaatagctttttgtacatcatcataatccaaacaatcagctattaattttggtgttcaaatttattatttttaaaaaattctactagttgttctaaagtatttttctttggtctggttcttaaagttgcatcaatagcgataatatcaacttttgtttcaattagttttttaagttcattaatggtaggtgtaataaaaacatcagttctgtgatactttttttgataataccaataataggaacttttaaatcagcgttaataatgtctttgatgttattaatttgactagttctaatgccttctgcaccagaagctacagctgctttggccattttaatacagttttaccaccgtataaaggttcaccttttaaagcttggcaagaaacaataaattccttattttttaataatttttccataatcaaaattaaacttgattgttttgaatctggctatgtacaacttttgtaagatcacttagttgatttactagattcttaagttcttcttgtccttgttgtgttttttgtaacattttttctttttgtaaatttctttttctagttttaaaagtgtattaaattcagttgtttttgttcaaatacttaaattaacaattgatttatcaaccatatctagagcaaaaagaaaagatgaaagatagccaataccaagagaaataacaaatgatatgattgtaattcaagcaggtccaagattaatacgagcttgccttggaatgaatctttgtgtcattattcatagaggtaatgaaacagcaaaaccacaaattaaaccagatagagccccttttcaattagttttcttagtaaaaatacctaaaataaaggtccctgcaacaggtgcagcaaataaaccaatgatggataggaaataatttattatatttccttcttttgtataaattaataaagctgcaacgagaaaaccaaaagcaccaaagacaactattaagattttagaatataaatttaaagttttatcacttgtttttggtcaaaaatattttcaaaaatcaacaataatagttgtaactaaagaatttaatgaagaagaaatcgttgattgactagcagcaaataccgatgaaagaataagtccactaattcctattggtagtacagaaataataaagtatgataacaactgattattagctgcatttttcacttgtactattgttgatatagcagttcgatcatcgacatcatatcctttagaagaatagtaagtatacaacattgatccaacaccgtaaaaaattattatggttacaagaactaaaattacattgatgtaaattgatttaataacagaaccaatattgtgtcctgttttatatctttgtactatgtcttggctagctgtgtgagtaaaaagtattttcaatgattttagaaaggaaaatgaagaaaattcctcctgaagcgaaatctatttttcattgtgattctttagtaaagaaagaatattttaaattaggtgagcttcagtgggtatttactaaaccaaagattaaaattaataaaattcctaaaaagagaataaaaccttgaaccgcatcagttcaaagcactcttttaaaaccatctaaaaatgttgaaattactactacaacaataacaataaatagtagtaaataacattaatattaacaaataaagacagtgctaatgtaggaatatataaaacaattgctattctaaaaatgtgaaataaaataaaggaaattgaagcaattgcacgtaaagaataatgaaatcttttctctaaataagcataagcagtagattccctcattctacgataaaaaggaactacaaatttaattaaaatcggtacaactaagaaaaaagaaagttgtgctatagctgacattcatcctgttttaaaagctaaacctggagttgataaaaatgtaattgaactaagtcctgtagctcaaatagataaaccaattactaaagcaggaattttcattcctttagctgttaaatattttgagttattgaattgaccttttgctttctggccttttgcttgtaaaaagaagaaagcacccattgctaacatagcaagaaggtaaaacactatcacaactcagtctaatcaagaaaaattcatattattgtttaataattttttgtagttcttttgctttttctaatagagtactacggtcatattggtagaaaggttttctagttgttccgtggataattccttctacttcaaaaacagctttaattccagccattactcccatatcaactaatttagatacataatcattgtatttatgtacagatttttgtactaattctttatcacctttttcaaaagcgtcaattattgctctagctccttttgtgttgatgttataagtagatccaataaaactttttgttccaagggttaaagcaggtgctattgcttcatcaaaagcaaataagaataatttatcaggataggttctaagaagtctttcgaataagaaaatatctgttgaaccatatttagcaccaacaacatttttgatgcttaataattcaccaaattctttaacaccaattttttaccagctaattgaggtaagtagtagataaataaaggtaaatctacattttttgtaatttcttcatagtaagatttaacttcttggaaagaaaaattgtaataatatggagtaatttcactaactgcatcaaatccaaattcttttgcttttttacctaagtaaactacttcatgaacattcacattacctacttgagcaattaagataactctttttttgtagcttttgctactctttcaagaattttttctttttcttgtaaagacaatgttaaaaattcaccagttgaacctgttacataaaatccgtcaattttttggacattaattagatactctactaatttatcaatagcagcgtaatccactttttcttttggtatcaaatggagtgattaatgcagggaatagtccttgatattttttgttcataataaaaacctttctgtaaaaatttaaagtataaaacagtaaaattataagtaagtgaaaattgtcaaattttaaatgtaaaataatttcatttttttactatgtaaaaattagataaaatactatttgcttattgtttaaaaattaaaggaaaaagaagaaaaatgaagtactattttttagcagatgtaggtggaactcatattaaatatgctttatcaacagcaagagcaaaatttgtttttgaaaacaaagttaaaactgatcacaaaaacattatcaagcaattaaaagaattaatcaaaccatatgcagaacaactaaaagccataggaattgcttcaacaggagttgtggataatcaaagacataaaattgtttatgctggcaataatttagaagttttaaaaggaacaaattttcgtttgttagctaaataatttaatgttccaatttgaacagaaaatgatgcaaaagctgcagctttttctgaaattcgtaaatcttcaagtaaaaattttgcattagttacttttggcactggtgaaggaacaggaattgttagagatggtaaattattaagaggtaaaaactttttaattggtgaattaggttatacaaaatgaaataataaaaacttgaatgattttctaagttttagtagttttaataacaaattaaaacaagaatttgaactaagctcaactgatactgaaaactttaatatgatatatcaatctaatgttgagtttagaaacattttaaattcttatttaaaaaatgttgctcaatttttagcacaagtttctatctattttgatcttgatgaagtaattttcggagggggaatttcctatttaagtcctatatttttgaagaaaattgaagaatatttttatcaagaattatcaaatactccatttaagacaaagataaaaccaacccaattaaaaaatagtgccagattggttggtgttttaaaacttttacaagctaataaattataatttttgatcagttaaaatcattgtgtttggatgatttaataaagcactaattggcaattgtgaattaaatttagttgagtttacaaagctttgaagtgcttttttctttgctggaccaaaagctagaacaacaatttgttttgctttgaatattgtatcaagacccattgtgattgcttttttaggaacttcatcaatggatttaaaaaaacgagaatttgcttggattgtttcaggttttaaattaataattcttgtttgtgaactctttaaactccctggttcattaaaagcaatatgcccatcgtttccaacacctaaaattagaaaatctaaaccacctgctgctttgatttggctatcgtattttgcgctttttggaaagtaattagctttgaattttattttagaaaacaaatgtttaaacataaaaaaatgataactttgctcatctttaggatctaatctgtaatattcatctaagttaaaagttgttatttcactaacatcaattttttctgtatttactttgtttgcaaagagtttataaaattcaataggtgttgaaccagttggtaatcctatgtttttgattaatttgtgtttgattttgttggttaataaatcaagtaaaaattcatttgctcgcgtttgattatcaaagactttgatattcctttttatcattatcagtttccctttttagcttttcaattttgactgaaatattcatataactcattaggttgtcatactttgttgttagatatttttctaacaataatatcagctataaacatttgattaatttttgaagtaagagcaattcttctgtttttttgttcaactgttgcaaaattaactacagcaatgttatcagttgctttgatgttgtaattttgtgtaattataattaaattaaagcggaatttttcagcagcttggagtaaaaacctaaattcaggtgaatctaaattttttgaaaagattatcactgaaatatcttcatatttataggattgtgagtataaaactatatcatcaattgagttagctaaaatagaaacaaattcaatgtttaataaagcattttgcatctcttgtgcaatttgtcttgatgttcctaaaccataaacaaaagtaactttggtttttttcaaaatagatattgctttgtcaagagcttcaatgtttagttgtcttagtgttttttcaatagaagtaaaatataataaattagttttttcaacgtagaaagttaactcatttggagctattttttcttctcttactttagcttgcaaaagtgtacgacgaaaatgattaatgtctttataaccaatttttttgacatagtgggtgactaaagatgtagcaacatccgctctttttgcaaattcctgcattgattgttctaaaaataaatttatattggccattatatagtcttctaaatgtttttctgttttagtaagagtgacattacgtattatatgttctatttccatatttataaattttagattatttatgaataatacaaaaaataaaaatattttttcttcattttttcctaattgtgaagaaaaaatatgattagttaaaagctaatttttttgaaattatctcgcttagttcagttggatttgcattagatttggtttttttcattgcctgacccattaaaaatttctctgttttgtcattgttgttagtgttttttgagatatattcttgatgttcattgattagttcatcaagtaatgtttccaattcttctttagtgtacacttttatgtctaaattgtggataatttcatctaatgttaagttaacttctttgtttttgattggtaagatttttttaacatgttgtaaattaattttattttcttctaatttttctaagacttgctttaaaaaagaaggttttatattgagattttgaaatcccactttattgataattggaacaatttcagcaaaaaaaactttagttgttttttctaaattatgataatcaacagaatctaaatattctcaaaaatctacattgtttaaaatttgatcaatatagaaatcactaattaaagcttcttttaattttagtttgacttgttctggtgttggtttgatttctaaaagtacttgatttttgtactcatttgttagtgcaaaacaaggaatgtttgtttcgggaaaataacggtaatctacagaatcagttttttctcttaaaactttgtttaaattatttttgtcatcatatcttttagttacttgttgaactttttgtgcatagtttaaaagataagtttgttcttcgatttcaaggttgattgcttttttgatattagaaatggaattgatgtttttaatttctactttagttccgaattcatttgatgttgcttcttttaatgaaagattaatgtcagctcttagtgatccttcttctagtttggcatcagatatctttaagaataaagctaattttctaatttcatcaacataagcagctgcttcttctgctgaagacattacaggataggtaactatttctattaaaggagctccagctcggttgtaatctaaatatgtaaattcatctttgtgaatttgttttgctgtatcttcttctaagtgaattctttgaattgctatttgtttttgttgattttcttgagttggaatattaataaatccattagttcctattggtctgaattgttgagttatttgataaccttttggtaaatcaggataaaaataattttttctatcaaaacaaagcgcgctttctatgttcatatttaaagcagaagctaagaaaatagcttttttaacagcttcttcattgactttaggtaaagtaccaagaaaacctaaatcaattaaagaaatgtttgtattttcttcttttgaaaatgagtttatggcttgagaaaacattttagtttttgtatttaattctaaatgaatttctactccaataacaggaacatattttttagtttccattattattctcctttgttaaagatttaattaagtcttcaaaataaagtgaatattttaataaattagcatcgtcataaagtttggattctacacttaagctaaaaggtaagttattaaatttagctaatggaatactaattgaaggattacctactaagttagctaaagtcaaaatataatctaaaaaattgtctttatcactagaagaattttcaatattttcaacatcaggtgcaactccgatataacttggaaagattacgcaatcatattgatttaagatttgattatagtattgtttaataactcttcttgctttttttgctttgataaaaaatttctcttggttgtctttagctaaataatatgaacctaaaattagtcttttttgaaggtggtaatcaaattgtgatcttgtttgttcaaaaatttgttctcaagtttgatttggttgcgcatttgcaaaagttaatccattaattgcagataagttagaagtagcttctgagtaagttataatagaataaacaggatcaatgcatcttaaaagttcttcatctacatcaataaatttgacatctacattttctttaattaattggtgaactactttatgaaatgctttagtaacatagctttttacaaatttaaataggtttaaaacagctactttttttggtttaaaatcttgtttgtttgcttgaaaatcaagtgataatgattgaatttcgacatcttttgaacttaaatcgttttcatcttttccataaataacttttgctacttgagctgcgtcattaatattatttgttaatcaagccacagtgtctaatgaagttgaataagaaaataaaccataacgagatacagctccgtaagaaggtttaaaacctacttttccaacaaaagcagcaggtcttcttacagaatctccagtatctgaagcgattgcaaaagagatgttttcattaatagttgctgcagccccagaagaagaacctccaactattttgcttgaatctaaaggattataaattggtccattagctgaaaataatccaagacctccaagtcctaattcatcacagtttgtaatggcaacaggatttgcgccttcattaatgagtttctctataacagttgcattataagaaggtctaaaattttcaagtgattttgaagaaccagtcactctatcataaatatttgcaaaatttgcttttatagtaaagacactatcacttaaaagtttattattatcttttaatttattcaatttttcttcaaaaatgaagtaaactgtgttatttttatcctcttttaaagttgcttttgctacttcaaaattacctaaattcttaatcattaatcaccttcttaattactatttttccatcttttgtatgagttgaatttttaaataaaattgcttgattttccttcattttttctttagaaagtaatatatcatcctttcttaagtattttagatcttctaatttttcatcaactctatctaatggctcaacattggataaatccaatttatctatttgttttaagccatttaacacttttttttcttcatctaaaagtaagttaataactttttctgttggtttaaagtaaagcaatttagctaattctataattttttctttttccattttttcctatcagtttggtagatttataaaagttttattatttaaatattttaatttaccttctaaatttaaacaaattattttataagaatgaagaaataatcttttattttttttaccaccatatttagtgtctccataaataggatatcccagatgttctaaggatactcttatttggtgttttttaccagttaaaatttgagctatttttaagtttttagaactaaaaaaatgagttaatgcaacagtggctgtttctttgtttgtaacttgcattttttttaatttttcatttttttctatcttaatttttacttcaaatttcttcttaatttcaatatctgattgaaaaatatagtattttaaaaaagaattttgttttttgtttaattccactaaagaaaagtaatttttagcataaattatcaaaccagaagttgccttatctaaacgaccgatgtgagaaggggtaaatgaattaattttttgcgtttttaaatattttgaaacttgattatctaaacttcaaacaccatcgtgaacagcgacattaatgtgtttgtttaacactaaaatattttcatcttcataaattacatcaaaatcaaactttatttttctaggtatatatttttttgtttgattctctaattcttgagtttttaatttatctaatttttcatttgtgtaaatttgaataatatcatcttgctgaacaatgtatttttttgtttgtggttttttattaactttaatttctttttttctaaaaagtttttctatttgagaagtgctataattttgcaaaattttagccacaaattttagtaatgttcttccatgatcattttctttagctattatttttaacataagattaaattttaaaataataattcatttttaaagctaaaaaatagttttttaatacaataaaataagatatatcttaaattttttgtttattagctataaacatttaactaataatattttaaatagttatttttgataaaaaaccttccttttggaaggtttttagtatttttaaatactattaaattcctaataaatattaaaaaagattagtaaaaattatataaaagctttttattactaaataaaataacttatttataactaaatttaaaaattgaaaattttacttattttagaatgttcactatttttttattttgtgaaaaagtaatattttttactttttctattgtacaatggatatatttaaactagaataatactgaggtgatacccttttcttaataaaattttaaataattaaattaattataatttggaatgaatgtttccctaaatttaatgggagacattcattttattctatctttaattcgtttgtgattgtaataataaatataatttgcaattgctttgtgaagttgtttaaaagttaaaaattctttttcgcagccataaaaacattctctctttaatgtcccaaaaaacgattcaataacgctattatctaaacaatttccttttggagacatggactgaattattcctttttgttttaatttttctgaaaattgtctatgttgatattgtcaaccttgatcactgtgaaaaattaaaccttcaagatttttgtgctttgaaaatgctctctgaagcatttttctaatttgctggttattagcgcttgtagacaaatctcaagcaataacttcgccattaaacatatctaaaattggcgataaatatgcttttccaaatggaccgctaaattcagttacatctgtagttcatttttgatttggttgagttgcgacaaaatttctatttaaaatattgtctgcaattttgccaatagttcctttgtaagatttgtattttcttctaggacaaattgctttgagattgaattttttcattaatctgcgaacttttttaaatccaattttatagtctctattattaagttcagcttttattcttctttttccatatcttgctttattttcttcaaaaataagcttcatttggcttataatttcttcatttttcttgtcaaaatcttcttttttgagttcataataaaaagtagatataggaatagaaaactcttttaatacttgagttaatcgcaggtttttatcagcttttactctattataaattttttttattttttcttgccttggttgatttgagtcaaagatctttaccaaggtttttcacttttttagtacttcattttccttttttaaaagtttaatttctttttcaaagtttttttctctttttttaaaatgtatgagttcttctttaagaagtttgagttctttatatacacatgttagagaattagattgatctttactatttaaattttttgaaacttttgaacgtttaccattaagaattttagatttcgttattggtcttcttttatttaattctaaaccactaattcccgattctaaatattttttcgctcaaaaagatattagacttggattaagattgttttcaagtgaaattttaacaatttgttcaccagctaaaaatcttttaactatgtttaatctttgatctatagttcactttttatttcgttgttttttcttaagtccttcaactcctaatttgttataaattttttttcaaaaatttactggatttaaaaaatttttctgacttgtattagcaaaatcaggctttttaatttcaattccttttttgtatttgtttacacattctaatttaaattctaatgaatatttcataaaaaatccccttttctatttttataagaaaaggagatctgctcaagaagactaatttactttaattttctatagttacattaaactttttaagttgaatagttttaattttacttttttcaaaaataaatcttgatatggctgaatcttcagtgtgatgatacttatcatcatcaaaataaattgttgtaatacctgtttgtgcaataacttttgcacaattagaacaaggaaataaagaaacataaagttttgcatcttctactgtattcaaaggtaaaatcgaatttaaaatagcatttatttctgcatgaattacatatgaatattttacttcgctagctttattagaatcttttgatcaaggaaaatcaacatcatttccttttggcattccattataacctattcccaatactctattttgtttgcttacaatacaagctccaacttgagtgttaggatctttacttctttttgcgcttatttttgctagtgctaaaaaatattcatttcagtttattgttttatttttcatttttcacctcattttttacattatgtttaataaattttgtttgttttattagttaatattataattttttaaatatcatttttaattaaaaaattaattttttatttaaaatttttgaaaatttataaattgttttatccttaaaagtaattatttttcattaataaaataatattatgatttacaaactataatgttcaaaaaatagaatgtaattcttttgtttacttttggatttttggttctaaaaagtagattttttcttcttttttaaagctaattaaactaattttacttcaaaacaaggtaaataatctaaaagataatcaataaactaattatgttaaacaaaatataattttttattttaaactttcaaaaattcactaaaatactttttaaatattggtaataaattaaaatctaattttttgaaattttcaattgattttaaaatataaattttgcattgtaacctttttattactcattaaattaatataattcttattttctctttttaaggattactaagttttgttgaaaaaccttcatttttaaagcatttttattttgttctttttcactaagaagttattcattgttaatattttcaatttttaaataaactaatttttcttcttttttccttttgtttttttaatttttatgttgttattgagaaaaaagaagtcttagttagcatactttgtatttttaattatagttttataattttatttttaatttattaatttataattataagactttgtataaagtaaaaattatataaatttaataagaatttgttcattaattatagggattttatgaaagcaatacaaaagtttttttctacttcttcagaaatgagattagctcaaagattattaaaaaaaattaatgatttaactggcaaatattcgaatatgtcagatagtgaattaacaaatcagacctttgaatttaaaaaacgtttatctgctggagaaactttagctgatattagagttgaagcttttgctgtagcaagagaagctacaaaaagaattttgggtaaaaaaccttatgatgtacaaatcttaggtggtttaattttagattttggatcagttgctgaaatgaagacaggagaaggaaaaactattgcttcaattgctccagtttatctaaatgcactagctggtgaaggtgtaattgtatctacagttaatgaatatctaacagaacgtgatgctcaagaaacaggacaagtttataactttttaggtctttctgttggaattaacaaagttggtttagataatgacacaaaaagattaatgtattcagctgatattacatattctgtacattcagagttaggttttgactacttaagagacaatatggtcttttcaaaagaagaaaaagtacaaagaagtttaaatttttgtttaattgatgaagttgattccattttaattgatgaagcaaaaactccgctaattatttcaggtggtcaaaataataattcttcaacttatttagcggcaaatcagtttgtaaacactttaaaagatgaagatttttatatagatttagaaacaaaaggtattaaactaaatgatcaaggaattgataaagcaaatagttttttcaaagttagaaacttgtatgaaattgataattcagaattagtacatagagttcaaaatgctttgcgtgcttgcaaagttatgaaacgagatgttgagtacattgtaagagatggaaaaattgaattagtagatccatttacaggtcgtgtaatgcaaggtagatcttattctgaaggactacaacaagcacttcaagctaaagaaaatttagaaatcgaacctgaaactcaaacattagcaacaattacttatcaaaatttctttagattatttaaaaaactttgtggaatgacaggaactgctaaaacagaagaacaagaatttattgatgtttacaatatgcgtgtaaatgttattccaactaataaacccattcacagaaaagatgacacagaccttatttttgcttcattaagagctaaaaataaagcaattatcaacgaaatcaagaaaattcatgccacaggacaaccaattttagttggtacttcacaagttaatgagtcagaaactttatctgaattattaaatcgtgagagcttatttcatacagttttaaacgcaaaacaaaatgaacaagaagcagacataatatctcgtgcaggtcaaaaaggagcaatcaccattgcaactaacatggcaggacgtggaacagatattaaattaggtgaaggagttttagaattaggtggattgtatattttaggaacagataaagctgaagccagaagaattgacaaccaattaagaggacgttctggtcgtcaaggtgacattggttattctagattttttatctcaatagaagatccactattacaaagattttctaattttcaacacattcaaaatgcctatagcgaacaaggtgatgaaccaattaaaggaaaaacaattcatagtattttattaagagcacaaaagaaaattgaaggatttaactttgatactcgtaaatcagttttaagttatgatgacgttattagacaagaaagagacttgatttatacacaaagagatattttgttagaatctacaaatttagatcattatattcaaagaatgatttcaagaactgttgatttaattttaggttatgactttataatcaaatccaataaagaagtaaattatacaaatttagtagcttttttaaatgataatttatctcggattaccaaatatgatttttcagaattaaatttagaaaaatatcattatgaagatctaaaagaagtgcttgaaaaagctttaaatagaatatattttgaaacagttcaattccaattaaaacaaaatttaggtgataattattttgctagtgaacgttatataattttaacctcattagatgctaaatgaaaaggacatattgatacaattgataaacttcgttcttcagctaatttagttcaatattcacaaaaaaatccttatcaaatcttcacagaagaagcaactaaaaaatttcaaattctaattaatgaaagtgcatatcaagcaattttatctttatttaacaactcaaatgcaagaaaaaatgaaacaattgattatcaactttcaaatggtcaaacaattagtttcaatgcagacacaccagctgaaattattcaacaagtaattgaacaaaatgaaatccaattagaacaattaaaaattgaatacgagaaaaaacaaaaccatctaaatgctttatatgaagaaactcaacgtgttttaacaactgcacaagaaaatgttttagatacagattttgaaatttatacactaagtgatggttcaactttaaatataaacaaatatttagatcctgaatttaaaaaacaaatgattttagaagctgtttttaaattacaagaaaatgaaatgcttgaacaagaacagcaaaatattttagaaaatagcaacaaaaatgaagcattttcttcaaattcaacaactttagactcaaaagcagacgcacaaccactagaagctaaacaggttgttagtgaagatgattctagacaaaaacaagaaaatacacaagaagataaaacacaagaaaaagaagaagacatagaactataaaatctacaaaaatgaagaaaattattcataaattattctttgttatttctattttatttttaattttatctttggttgaatcaacttacatttactttgttttagctcaaaaaaatgtaacaaacttaatttttaaattatctcttactttagttacaatttgtttcaattttgttccttttttatttttttgacgctttaaattaggaatcaaaaattcttttttatctgataaaagatttcataaagacttttgtaaagctaagtttttaaaagaagtaaaaatttggtgacttattgttttagtgatttgaactttgataagtttatacttgacatatctttatttttctacaaattccaaatcatttagtattttttacatttgatatttcttttttcttcttttatttttctttttttgaaaaaaatcattttgttattgtgttcaacaaagccaagattctgaatgaaaataattatttttttcttttagtttgctacttacttaaattttttagaaattgtgctaagatataaaattaatatttttaaatattaattaaattaatttttaacattttaaaaaaaagaaggaagaaaatgacaccacatataagtgcagaaaaaaatcaaatcgcaaaaatagttttaatgccaggagatccattaagagctaaatttatagctgaaaattatttagaagaagctgaattagtttcatcagttagaaacgtttatatttacacaggatttttcaaaggaaaaagaattagtgtagctgcttcaggaatggggacaggatcaattggaatttatgcttatgaattatttaagttttatgatgtagaaaaaattgtaagaattggctctgctggaagttatcgtgaagatttaaaggttcatgagattttagtcgctgaagaagcaatttctgattcatgtgcttttgcacaattaatgctcaataagaaaaaacatttgattcattcagacaaagacttagttgctgaattactttccattgccaataaaaagggaataaatgtttctttagaaagagttcattcaacagatgctttctattcacaaagaccactagaacaaacaatagaattaactaaagcttccgctgtagaaatggaatcttttgctttatttgttgttgcaaaattattaaataaaaaggcagcaagcttactaacagtttcagataatctaattactaaagaagaattaaatccattagaaagacaaaatggatttacaaaaatgatggaaattgctttagaaataaagtaaaattgtgaatattttagaaattattaacaaaaaagtacacaataaaaaaatcactcaagaagagtttgattttgctataaattcttatatttcaggcgaaatcaaagattatcaaatgtcttcttttttgatgtctattctcttgaatggtttggataaaaaagaaacatactttcttacaaaatcatttgtcgaatctggagaagttcttgatttatcaagcattaaaggtccaaaagtagataaacattcaacaggtggtgttggtgataaagttactttaattattggtccaattctagctgcattaggtattaatgtagcaaaaatgagtggaaaaggattaggacacacaggcggaacaattgataaattagaatctattccaggttttacaacagttttatctgatcaggaatttataagtcaaattcaaagaactcatttaagtattattggacaaagtaaaaatttagtcccagctgataaacaaatttatgctcttagagatgtaacaggaactgtggattcaattgaattaattgcttcttcaataatgtctaaaaaaattgcaacaggagctgatgcaattttaattgatgttaaatgtggtaatggtgcttttatgaaagatttaaaaagcgctagggcattagctacagaattaattgaagtaggaaaaaaattcaaaaaaaatgtacatattcacattagcaatatgtcttcacctttgggcaaaatgataggtaataaaaacgaagttcttgaagcaattcaaacacttaaattgcaaggtccaaaagatttagaagagatttgtgttgcttcttgtgttgaacttatgatgcttgttaataaaaaattaactgaaaaagcagcaacagaaaaagttctagaagttcttaaaaacaataaagcacttgaaaaattctatgaattagtagaaaaccaaggtggagacttggaacttttaaaatctaacaaattctgaacacctaaatacaaattagaaataaaggcaaaagaagaaggatttttacaaacaacttcagcactaattttgggtgaagttgcagttaaattaggtgctggtcgtatgttcaaagagcaaaaacttgattatgaagcaggaattgaacttaaaaaacaaaacaatgattttgtgaagaaaaatgaagtactttttgttttatattcttcaaatcctattgatgaaaaacttaaagatgaattagaaaaatcttatgtaattagacaaaaaccaaaaaaacaaaaacttattttagaaagacttggataatgattgattataaaaaaatgattgaccatactttattaaaaccagaagctacatctaaagatattttaaaacttatttcacaagctaaagaacatggatttagaggagtttgcattaactcttcttgagttaaattagcaaaagaaaaacttgcaaatacagatttagatatcgtttcagtagttggctttccattaggtgcatcaaacacacaaaccaaggtttttgaagcaaaattagcagttgaacatggagctactgaaatagatatggttataaatgtgggtaaattcaaagaaaaagtttatgactacatcttaaatgaaatccaacaagttaaaaaagcaattggaaataaaatattaaaagtaattatagaaacagcgcttttaactaaagatgaaataaaaaaagcagctgaattagtattgattgccaaagctgatttcgttaaaacttcaacaggattttcgtatcgaggagctactgcagaagacatcgaattaatcaaagaagtagtgggcgataaagtaaaaatcaaagcagctggtggaattaaatccattgctgatttagaaaattattataaattaggagctactagatttggaacttcctcttctttacaaatattctctctaacttcagaaaaacaaaaactaatttattaggaattttttaatattcttttataattcataaaatttgcaaaaaattaataataaaaaaaggaaaataaaaaatgttaaaaattctaactcatccaattattgaaactaagttaacaaaaatgcgtgatgaaaatactcctcaccatatttttagaactttattagaagaaatttcttcattaatggtttatgaaatattaagagattataaaacaaaatctttacttgtacacactcttacaaaaagtgtttataatggacaacaattagatgaaaaaatagttttagtgccaattttgagagcagggttaggtatgttacaaggaattttgtctttagttcctgaagctcatgttggtcatattggactttatagagaagaaactacttttgaaattaaaacatattattttaaactaccaacagttaaaaagtcttcaaaaatcttaatcttagatccaatgttagcaacaggtcattctataattaaagctatagattttgttaaaaaagaaggattttcagatatatctttagttaatttagttgcagctccagaaggaattaaagctgtagaagcaaaacatccagatgttaatatttatgtagcagcagttgattcgcatttaaatgataaaaaatatattgttcctggtttgggtgatgcaggagatagaatttttggcaccaaataaaactaaaaatgaaaccatttcataaagcacacagttcagcaatttttaatttaactataaccggtgtatttttagcactttctttaattttttttctattatcacatcaaaaattctttacttgaccaattgctagcagcataggtcttaaaatagatttatcaactttatttattttaccgatctttgtatctgcaagcattgcttatggcattgtagccttgataataagatttattttaggaccatttttaaatccatctattagtcttgagattgattattttggtaattttatcttgttattttcaagttgtattttcatttttcttttcttaagctttagatatgtatttggcttcaaaaaagaagcaaaaacacaaataattacagaagatcacaaatataaatttgataaaaaacaagcaataaaactaatgttaaatttattagtttcaacatttattacttcaataatattaacaattttcaatgctttcttttttactcctgtattttttaaattattcaaactaacagataatattaacccaattgatttagcacaacaatggttaactaataagaaatttaaaagcttttctttatctttaaattattttgtttgagcttttgttttatatttcccttttaatttagtaaactttactatcacatctattttgttttacggaatttatctagttatgataaaaagtcattcaaaaatgaaaaaaagcttcaaatattaataaattttggcactttttagtgtttagtgctatttttggtataattataagcattaatgaaaaaccaatcacaaaggaaaaatatgacaactaaagctaaaaaaacaacaaatcaaaaatttaaattcatagtagaatctaaaaaaatctactttccaagggttgcagatgcaactgcaaatacaaaattagaaataggagtaatcccctttcttagttctaaaacagtaacaaacaaaagatctttagatattttacaagcaataagaaatgatagtcctaatggaactcttttaggtcaagaacttgttattgcttatagtgttccaccacatccttctgttattagttctttagatgatttgcttaaattagcttcattagttaagatagtttctgaaaaaattgtcaaagattcaaaaggacaaattggttcaattgttattgaatttgaagtattacaaaaggtaagtattataaatatcgaaaaagatcaagaaggaattcactttattgatgctatagtaaaacctgttaaagaatttgtttcccctgaagctttagatattgatcatattgttaaatttacttcttttttagctcaagataatataaaaattagattaagtttggtttcaacagatgttaattcattgtatgatttgcaaaaattaattgatgaagaattacaaactccaaatcaaattttaatcaatgctgttgttggcgcagctagtcatgaaagctttactcttttagaaagttacaacatttttgaacttaataatttcgttgataaaatgaagttgattattaaatatcgtaaatacagacatttatttagaatgctagataaagaaattgaccaaatgatgaaatctaatttagataaacaacaaacagagtttattttaagagaaaaaattaaaactatacgtcaaaaattaggagatgatcaacattatgataaccaacttttacaaactttaaaaacagataaagcaaaagctaaattccctcaagatgtaattacaacagtaataaatgagtcaagaagaatcaaagggatgatgtcaacttctcctgaatcaaatattagtaaaacatatattgacactatcatggcgcttccttgaagacaagtttcattagatcatttaaacttagaagaagccaaagttgctctttctaaaaaacattatggtttaaatgaagtaaaagatagaatttttgaatatttagcaacattaatcaacagaaaacaaaaatttgaaaacgaaaaagactcaaacaatctatcctttgttgaaggcaatcttgctattgattctaatttattttcaacaaagaaaaacaatgaattaaacaattactcacaaatgccaattcttactttagtaggtcctccaggtacaggtaaaacttcgatagcaaaatccatcgctgatgctattggtaaaaagtttgtcaaaatctctttaggtggattaagggatgaatctgaaattcgtggacatagaagaacttatgttggggctttaccaggaaaaattatccaagctattaaaaaagcaggtgtttctaatccattaattttacttgatgaaattgataaaatgagttcagattttaaaggagatccagcttctgcaatgttggaagttcttgatccagaacaaaacaaatttttccaagatcactatttagaaatggaatatgatctttcgcaagttatgtttgttgcaactgcaaattacatttccgacataccagaagctttaatcgatcgtgttgaacttcttgaacttagttcttatacttttttagaaaaaatcgaaatcgttaaacatcacttacttccacaagtaatttctgaaaacctattagataaaaaacattttaaaatcaacaacaaaacaattgaatttataatcagaagctatacactagaatcaggtgttagacaattaaaaagagttcttgaaaaaatcgcaagaaaaataattatgttgcttttagataaaaaaatagaagaaaaagaagaatttgtagttgatgaagaacaagttgtgaaattattaggaagaataaaatacacttcagaagaaaaagaaaacacttcacatattggatcagttactggacttgcatatacttcagttggtggttctactttacaaattgaagtaacttgtgtaccaggaaaaggtgatattaaattaactggtcgtttaaaagatgttatgcaagaatcagcacaaattgcgcttacttatgttcgtgccaatgcagaaaaattcggaattgattttgattttgataacaaccaaatccacatccacgtacctgaaggagctgttccaaaagatggaccttcagccggaattacttttacaaccgcaattatttcagcacttgctaaaaaacgtgtaagttcaaaagtagcgatgacaggtgagataacattaagaggaaaagtgcttgaaataggtggtttaaaagaaaaatctttaggtgcatataaaaaaggaattaaaacaatttacatacctaaaaacaacgaaaaaaatcttgttgatattcctgaagaagttaaaaaacaaatccgttttgttgcagttgaaaaatatgatcaaatttaccaagaactatttgaatcaaagttagtaactagttaattttggcaccaacaagcttaaaaaatacttgaaaaatacaaataatttggtaaaattattttacttaatttttgctgttaagcagttttatacgtgtgtggataggaaatagttgaaaggctattcataggtggttttaaacgcgtttagaattttttaaatatattaaattaacactgaaaggaaaaataatggcagtacaaaaaccaggtgcaaaaaaagattttgaccgtagtaaagaacatattaatattggaaccattggtcacgttgaccacggaaaaacaacattaacagctgcaatttcaacagttctatctaaaaaaggattagccgaagcaaaagattatgcttcaattgatgctgctccagaagaaaaagctagaggtattacaattaatacagctcacattgaatatagtacagataaaagacactatgctcacgttgactgtccaggacacgctgattacattaaaaatatgattacaggtgcagcacaaatggatggtgctatcttagttgttgctgcaacagatggaccaatgcctcaaacaagagaacacatactattgtcaaaacaagttggtgttccaaaaatcgttgtattcttaaacaaagtagatatgttacaaggtgaagaagaaatggttgacttagttgaagttgaagttagagaattattaagctcatatgactttgacggagacaatactcctattgttcgtggatctgctaaaggtgctttagaaggaaaaccagaatgagaagcaaaaattcttgaattaatggatgcagttgatacttacattgactcaccagttagagaattagacaaaccattcttaatggcagttgaagacgttttcacaattacaggtagaggaacagttgctacaggtaaagttgaaagaggacaagttaaattaaacgaagaagttgaaattgttggatataaagcagaacctaaaaaaacagttgttacaggtattgaaatgttcaacaaaaacttacaatcagcaatggctggagataatgccggagttcttttaagaggagttaacagagacgaaatcgaaagaggacaagttattgctaaacctaaaactattgttccacatacaacatttaaagcagctatttatgttcttaaaaaagaagaaggtggacgtcacacaccattcttccctaactacaaacctcaattttacttcagaacaactgacgtaacaggtggagttaaatttgaacaaggtgtagaaatggttaaacctggggacaatgtaaatttaactgtagaattaattgctccaattgctgttgaacaaggtactaagttctcaattcgtgaaggtggaagaacagttggtgctggaacagttacagaaattgttaaataattaatttccaaataataatattaaaattaaaacactgaatttacttcagtgtttttttattttcttaaaaagtattttttattttttaaaaaataaaaaattaggaaaaaattgagttgatacccttttcttgaaaaaatttttgagtgttttaattaattataatttgaaatgaatgtttccctaaatttaatgggagacattcattttattttatctttaatttgtttgtaattgtaataataaatataatttgcaattgctttgtgaaattgtttaaaagttaaaaattctttttcgcgaccataaaaacattctctttttaatgttccaaaaaacgattcaataacgctattatctaaacaatttccttttcgagacatggactgaattattcctttttgttttaatttttctgaaaattgtctatgttgatattgtcaaccttgatcactgtgaaaaattaaaccttcaagatttttgtgctttgaaaatgctctttgaagcatttttctaatttgctggttattagcgcttgtagacaaatctcaagcaataacttcgccattaaacatatctaaaatcggtgataaatatgcttttccaaatggaccgctaaattcagttacatctgtagttcatttttgatttggttgagttgcgacaaaatttctatttaaaatattgtctgcaattttgccaacagttcctttgtaagatttgtatttttttctaggacaaattgctttgagattgaatttttccattaatctgcgaacttttttaagtccaattttatagtctctattattaagttcagcttttattcttctttttccatatcttactttattttctacaaaaataagcttcatttggcttataatttcttcatttttcttgtcaaaatcttcttttttgagttcataataaaaagtagatataggaatagaaaactcttttaatacttgagttaatagcaggtttttatcagcttttactctattataaattttttttattttctcttgccttggttgacttgagtcaaagatctctaccaaggcttttcacttttttagaacttcattttccttttttaaaagtttattttcttctctaagaagtttaagttcttcatatacagataatgaagaatttgattgattttgactatcggaattgtttgatacttttgtagatttattattattaatcttagatttcattattggtcttcctttgtttaattttaaaccactaattcccgattctaaatattttttcgctcaaaaagatattagacttggattaagattattttcaagtgaaattttaatcattgtttcaccagctaaaaatcttttaactatgttaatctttgatctatagttcactttttatttcgtggttttttcttaagaccttcaactcctaatttgtcataaattttttctcaaaaatttacttgatttaaaaaatttttctgacttgttttagcaaaatcaggttttttaatttcaatttcttttttgtatttttttacacattctaatttaaattctaatgaatatttcataaaaaatccccttttctatttttctaggaaaaggggatctgctcaaaatcaagtaaaagttttttaaattatgaaatttaggactaaaaaattttaatttgcttgctctaattactatttacatttatgtaaattcattaatcatagtttaatttataaaaatatctttataatttaatacttttttagttgcgaaatattgtataccattttttaatcttaaaaaataattagaaaatcattttttataactttaccaagaaaaaagtgttcaagaatacccattttgaagtgtttttttcataaaataagtttactaattaattgattatttagtaaacaaaacgaggaaaaatgaaaagcaacaaagtcttattatcttcaataggtttactctttttacctgcatttgtatttttaagctgtgcatataatcctgctgtaagtcttagcaaagcatcaattaatgcatcaaaacaacctgaatcaataactaataactcaacaccatctaatatttcaaataataaatctgaaataaacaacaaaccaaaaacacaatcacaagtagttccaaccaaaacttctctttaagctcagtttaatgaactagaacaaaaatgaagcaaaatcaaggatagtaaattaaaaaatactgcaaatcctttagtaaaatcagcaatagaatattgaatcaaaacactacaaattgcttttaatagaaccaattttaacccagtgttagctagtacaggacttgatgtaattgttgtaaaactaaaagaattcgaaaactcaattgatgtgttagcaacacaaaaagaaggcaatcataacactaattctacttcagcatctaatcaaacacaaccagttgtagtttcttctttagaagaaaaaagaagcaaaataaagcaagacttgtattcttcaatgctggaaaggcaacattttaatattaaaaaactttcttcttcttctagttcattatcatctaaagaatatggatattattcatttgttaatccaagaattaaaaaattagcagatggtgaagtgctattaagtgcagatggaagagaattcaatgataaagatattaataacagaatcaatcaagttttattacattctgaagatggaagatcaacttgggataaaaatattactcaaatagtatctgtaggtggaggtaaaacaaatattggaactgctaactcagaatcttttattgaagtcactaatccaaaaaatcctccagaaaaaaattaattatatttttaatatttgattacctaattttaattattcatgatataaaaaacatcgtgcagaatttgttaataattctttaaattgaagaagattttacatttttgataataaaacagagtacacaaaatacaaagatgcaactacagctgcaagtgatacaaaatatatagcaaaaccaattttatttaatggtgaaccaaactgatgaagaatttataaagttaaaaataatgttgaattcaaagatataaacgctaacactgaattagaagatacaaaaattttatcttgataataattaagatccagtaactagaaaaatgactggtaatgtttataaaaatgttgaagcaacacaagtaaaattaaagcctaaattttttcaacatctattaaaatatgattcatcaatttatgaaatttgaaattacaatccaagctctaacaacgctttagatgttaaatcttcaaatattagaactcttttagcaccttttcttgctggttctatatatgatgttgaacaagaaagaacgacatgagccaaagttgaaaaagttcaacaaggaataagagtacaagtattcgacaaatctaaattttttgcttttgatgaaggttccaaactttattctttagaatcatataataatggaaaaacttgagctaatcttagagatttaggctttcaactatctttagaagatggtaaaaagttaggaaattattttggtggtttaatctcaggttcaggtaatggtattgagctgcaacatcaaagtgataataataaaaaaacaaatggtagaatactttttacagtatattgatgaacttgatcagatcctaataattcaagcagtgttcaaaaacaagaaggaatatgaatttactcagatgatcaaggtcaaagctggcctcgcttagcaaaagatccaataaaagatgatacttttgagtctacatttatttaaatatgattctggcaaaattttcatcaacaaaaaagtacaagcacacatcgaaatgcgactttagtctcagatataagtgctttaaatccacaaatgactaaattagctgttgataataacaatgttttctcctcaaaatgaaatcaaggatttgcagtttttaattgagataataatctttattatctaatttctgcacctaaaactggcactactaatggaacactgtttttatacaagggaacagatttaactcatccaattaaagcatttgaaattacagattcaaatacaggatttaccaattcagtaattgaaattacatatcgtcaaggtaattattttgagtttgcagttggttatgaaacatatgaaaatatttcaaaacttaatttagcttcaggtaaattaataaaagttgacaaattcgcaatggtaataaaataaaggaaaaagcaaatgaaaattttaagaacaaaaaaattatttctcattttagcaacatttattccaacattacttttaataagttgtgcatattctcctattgtaagtcttgaaaaagttaataatattaatacaacaacacaacctgttcacaaagcaaatgttagttctcaaaatattataaattcaacaactaaaaataactcaactacttcaaatacaaagcgaagtgaaggaaaagtaagtgataattctactaaagattccaaatctaataattcacaaacaacaactgaacaaaacaattcaaaatcaagcaaaaatccttcaaatacaaattaaaatgaagcaaataaaacatcttattttactctacaagttgatttacacaagcttcaaaaacaaagagatgaggatgtaaaattaataaaattttcaatttataattctttaagttataacattaaacaactttcagcatctattccacttgaatcttttactaataaagttcatttatttaatattcctgctattaaaaaatttcaaaatgaagcattaattcttgattcagatgctagagaatataatacaaaagatagctttaatatagcaaaacaagtaagtaaattttcaacagacgaaggaaaaacctgatcagatcttcaatcaattgtaaaagttggaggaggaaaacacaatgctggacttgcagtggatggatattttatatcagtagaagattcagaaaatccttcaaaaaacaagctaatatttgtttttgatatcactcaacctgatttttctttatttaattgatacaaaaaaccacataatgaaatagtaaattccaatttaagaaattgaagaaggttttacattttttaattctcaaagtgatgcaactaactatgcaaatggtggttatacaagagaaaatgataattatttagctaaaccaattattttcaatggagaaaaaaactgatgaaaagtttataaattaccttttaatgttagttatgaacaagttaaagcaacttctaatttaattgatacaaaaatttatgtaaataataattataatccaactacaaaaactatttctggaaatgtttacaaagatgttgaagcacatcaaagtaataatgataaaaatcaatatacttttaatgaagatttatcaagatatttagatggatctatttatgattttgcagatgttagacctgatgtgcaaaatcacaaactaaaaaaatatgcatttgatggtgggcttcaattgtattcattagaatcatatgataatggacaagcttgagctaatctaaatggtatcgatatgagtataaaaaatgataatggtacaaattaagcaagatattatggtggattacaagcaggagttggtaatggaaatcagcttaaacatcaaaaaggcgataataaggatttaaatgaactttattcttcccagtttattgatttattaatctaaatccagaaactggaagtgaaaaattagttcaacaacaaacatttattttttctaaagatcttggtaaaacttggtctcttttagatccaaaagccaacttgtcttcaaatacatacacagagtccattataaatgaagacgaaaaaggtaccatttatattaatcaaagaaatttaagtcattatccaaaagttatgatgtcaacagatggattaaaaactacttcaagagttccatttcaaagtgatgcttcacaacaatatgatacttatgtagctcaaggatttttaaaaataagtgcaaataatcaagactactttttaatttctgcagctcaaggtccagtaagaattggtggaaaaatcttcttatatgaaggtgatttgactaatagaaaaacaatatttaatgtcacaggagattccacaccatttttatactcagcacttgaattactatatcaaaaagataattacattgaatttgcactagcttatgtcattgttgataataaattaactattgctaatctaagtgatggattaagtatttatgttgaaagatatggtttgtatttaagagatctagttaaactagcttaaataatttcttttaaaaaaacattgaattatttcagtgtttttttaatttattttaaaattaaattatgaaattattaattattacattagaaaactttcaagatttagaattagttggttttttagtaacagttaaaagagcaaaaatattcaatgaaattagttacttcaatttagaaaaaacaagtgtaactggtcaatttaatatagttaagttaacaacaaatacaacacttaattaccaagaatatgatgcagtttatattccaggaggaagagccgctcaacaattaagaaaagacaaaaaaactttagaagttattaagtattttctagataataacaaatgagtttttgcaatttgtgatgtgccaaatgccttatatgaaaccggattattaaaaggatataaatttgttggttatccaatagaaaatcaacaaagaccacaaggtttttttcaaaataaatcagttgttgtttctaaaaatttaattagtgcaaaatcagctgaatatgcagtgaaattgggtttaaaagttatagaaaaattagctaacaaagaattatcaatatctgtgtgacaagctcattcaggaattttgaaataaaaagttaagattttaaaggttgtaaataaattcctcatagtaatagaatttaattacattattaaagtaaattagaagaaaaaatgaagcaaaaccaagcaaataataaaaaattaaaatcaatttattaattattaataaaagctataaagtcttatcacttcaaaacttttatcttttaaatatccacattttaaaatggatattttatttacaaaaaaatagagaaattaaattaccttattattttatataattgtaaacacttttaaattattgatttttgttttaaaaaaataataataaattaataattttgtaaatttagtaaatataattaaataaaaataaaatgacaatattcctttgatgaaaagagatattatgtacaaaaacaagaaacgttcaatttgattactgagttcagtttttacttcaaattcattattgattacttcatgtgctagtatagaagctaaaagtgaattttcagaacaagacaagaaagaaattgaagaaaaaaatcaacaaattacagatttaaaattacaaattgaaaacatcaaaattaaactacaaaatgcttcaaaacaaggggtaaatgcctcaattaatgataatgaaaatgaaaaacttaaagagcaaattgcacaacttcaagaacaaatcaaaattcttgaagttcaaaaacagaatgaattaatgaaattaaaaaatgaaattgataattcagcaaatcaacaaaggcaaatcacaaagaaaaatgaagcaaaaattaacaaattaaaccaagacaaaaatgatttagcaaagaaaaattcagatttttttcagattcttaaaaatgatgaattatacaaaaattttgatcaagttagttattcaccaactttatttaatgatagtcaatctctgcttagtagctcaaagtatttactagaaaatagctttgagcaagaaaaactaaaaataaaagagattctttcacctattttagcacaagacattttaataaatacaaaatccaatgttacagtagaaaattacaaagataaaataataaaaaacaaatcaaaaattttattagctctttcatatattagaaagtgatatgactttaatattggtgattttaactttagaaaatttattttgtatgataatccaaatctacacactgagaataaatcaattttggaatttttaattcaaatcggttccaaaccaactgttgattatgaaccacaaaacttaataaatttttacaatgataatttaaaaaatattattgatcctaataaagatttttttgattttatagagtcaaaagtaaaagataagtttcaaaacataagtgttgaaacttgatttaatcaacaaattagtcagtttttatatcaacctgaaattaagctatttgcttcagaaaaagaagtaatatcaacaaaaacaagtttgtgaacaaagttgacttctgataaatttaaatctcagttttcacatttaattccaacacttttaactgctagaaatcaaaatagtggtttatttgtagttaatacaattggtgcagttatttttggaaatcaaaaactttatgatagcttggatttaggtttggatagaataagtgataacaatgatttaaaaattaaattgaaaaaatttggtgatagattagaaggattttttgaattttactataatttaatttccaaaaattttaaagacaaattatttaataaactatttatatttgattcattatgagaaggcaaaaatagttgattatcacaagaaaaattacttgataagaccaagccagcttcatatgattttttctcagtcattgattattgaggaccctcttttgaatcaaatcaacaaaatacaactttaaataagtcagaagatgttatgaagttaatccaaccaagatttttaactgaacttggtatacaaaacattataaaagaaataacaaacaatctcaaagatattatttttgaaaatcataaagttagaaaaaatgttaaagaacaaatgttggattttgattttgcaaaatatctttttgattcaagattttttataggattaacttcagtaggaccagattctgaaattggaaaactaagttatcaaaccattaattattctaacttagaagacttacaaaaaagatgaaaacatgcaatggaacttgtttatactcttgaaaatatagaagctgatttaaagcttaatttaacaaaaaactcaaataattcgaataaaacagaagaaaataaagcaaaattatttttaaaagtttctacagaccaaaattcaaataataaattttctactgtagaacaaagtgaaattaattcaataacaacaatggaacaattagtagatagagattatgtttcttcttggggatatacaccagatgataacaataattcagattttgatttatttacagctttttacggaactgctgataaagaaaatggaattacaggaactttttcaatgagaagaatttcttttgaattattagctgaatttggttgagaagaaggaattataaattacttaacaaataaactcaataaaaacagtgatgcagaaaccattaaagctatttttagtgcaaaaacttataataacttaaaagatttcaaaaaagctatgtataaacaaaacaaagaaaaacaaaataaattaaaagaagttgaagcaaaaggatttacaaataaatacaaatcagaaaaacttaattacaacacaataaaaaaagttttatctgaagcacttgaatatgatttatcaattaatataacatctaaaaatagctataacaatttaagagattcttatttttatgtatacaaacgccaaatttttagtagttattatattgcaactaatggatttaaagattctatttataaagatgagtaataaaaagaaaattaaaaaaaagagatattatatatctcttttttttaattttatattcataaataaagaagaaaaagaaggaaatttgattcaaaattagcggttttgtttgttgtttttagctttttggttttagtaagtaaataccaagtcttaacattccacttccgtgaatttgtacatcattagagttaggatttactatttttaaattttcagaataaatagttttagctattaaaaacttatcagatttaattgataaattagcttttggtctatttcctcaagaataaattattaacaaataagttccatcatcattttttcttgtagtaatttctgattcatacaaagcttcagctgtattttttcaaatgtatactaaatcatttggatttgtaacgtatttttcatccatatcccgaagtgatggatattcttgtctagttttaattagtgtttgaattttatgataagaagattttggattatttactatatcttcaataaaaccttgtccaacagaagcatttgttgaaattatttgatcaatatcacgactatcttggaaaaagactcttcttcttaaatcttttcaataaaaagcttctcttacatttgtatcaggtgatttagttgctccttgcattaaaatttcatttccattgtataaagttggtaatcctcctcgggatagcaaagaaaataaagcatattgataagcagaagattctaaatcagaaagtttatgtggacttactgttacaggaatatgtcattgacgtttaaaattattaattcatctttcaacatcatgattgtctaaaaaagccattcattcatgttttatattgttttgggttagcgatttaataacatttttttcatcttgtcaatttaatgaaacattagtttgtaatttccacttagtaccatcaattacagaagataatccttgattgtcttttgctcagtattgtctaatttcactagcagctggatcgcttcatcattctccaaataataaagctcttttcgatgctctatcgacttttgcttcttgggcttgcttgtatgtgtcttcaacaacttttcttcaacgagcaaataaatttgttgtttttgaactatctaaagtaggtttgtgtggattttttgatttaaaataatgttcaaaagcatcatatctaaatccatcaactcctttagcagctcaaaatttgtgtacattatcaaattcgtgtaaaacatctaggttattcaagtttaaatcaggcataccagatcaaaattgtgcaactcattttagtcttgaaggagttggattttgtttaggatctaaaggattgtaaacgcttttgaagtattgacgaatattgtcttgaccttcggattcataatgtttaccatctggttcatacatatagtaatatttttggtactttttatccccagctaaagccttttggaatcaaggatgttcgtaagatgtgtgatttaaaaccatatcaataactactttaattcctcttttatgagcttctgttaaaaagtcttcaaaagctttcattcctccaagctcaagagcaacatctgtgtagtcaattacatcatatccatgatatgtagaagaaggatggattggtgaaagataaagagtatcaattcctaaatttgaaaaatattccagtttatcttttaatcctataaagtctccaatttcatcattatttccatcagcaaatgaataaacagtgagctgatacatcacatttgattttttggctttggtgttaaatggagcgataaatttgacattttttgcttcattttcatagcttaatttatttaaattgtgttcttgaatgtactttgcaaaataaggtgcacttcaattttttaattttttaagtttaaaaagttcttgatattgtgctgaggattttagttcttcaattgaataattttgtactcttacttgactagtatctacttttaacgtatctcaaatgggttcttttgcttcaacaaaatccagttttggatcatgaaaaatcacaggtggaagaatttggatttgtagagtttgttggtttggaagtttgaaaacttgattttctgatttgatataattaaaagcatattttctattctctaaagctttggtagttccaaaataagcattatcgattgcgcttttgctgatttttaattcaatgtcttgattatctaaattaattactcaacttttattagtatctaattttgcattagtttctattcagaaaatacttttagttggattgttggaagcatttgaagaaatagatgataaaactccaacatttgcttgattttgtattgtatttgtagaatctgttttattattgttaactaaagttttgttatcttcttgtgtttgtgaacaagataaaatcaacaatgaagaagaagttactaaagaaaatgaagcaatttttaaaaataagcttgtttttttgttcatattaattagttaaaagtttttaatttctatgttcttgttgattttgttttactttatttaaattagtttgtaattgatcatattcttgtacttttttatcaaattcagcaaatgaaacattggattttataagttgagaatcatttgttttttaggaatcaaacctgtatctgtatagagttctaaggaatgtttgataatagcaagatttaaataattagcaaaataataaagaaaatcatcatcaattttattgatatcagcgtgtttgtcttttaatatattaggtaaaaaagaagtcactctttgttttacttcatttttcttagttttgattccatttttaccatttagagaagaagataatgaagaaattaaagcattaacactgtgtaaatcatctcctttttcaccgtgattttgattatcatctaatccaaaaataaaataattttcaagatgtcttaaatgaaatccaatgttatcaactttgtatggagtatatccgctattgaattttgcttcatctaatttttcttttggaactatataagtttcatgtttattatctttaactgcattaaatttatctaaactatcataaccaaacattgttgccataacatttcttaaaccagtagtttcacccaattctgatttaatattttgagatgcttgactatcataatcacttaattcttttagcattgaatcatattgatttgtattatggaaatttgtttcatccataggtttatcggaagtttttgtttctcaaggaattaaagtacttttttcaaattcgttatgttgaccattttgactatttactaaaacaattttatttgcaagatttttaaatttagtttcaatttcttgtttttttgtttttacatattcttttaattgtgcttcattttgttgattttcaagcgcaagagaagtaaataattctttgtaatcattttcaattttaagttttttagtttttcaagcttgcactttgttatttaaagcagtttgtaaagtaacaatatcagattttattttttttaattcatcaaaagatttttaatctaaagaatctttaaattcagctactttaacttgtaatgcttgactttcttgttgataatttcctaaactagaatctttttcagcttcagattgtgtaagcaattcttcagatttttgaaggctttgttgaacattctgcttttctttttccatttgttctttattaatttgttgttgattatcttgtgattgttcattatttacaggctgattgttttgaggattgtgattatcatttgtggtattttctacattagaagaattttgattattgtctgtagatggacttttattttgtgtattaagattttcttcattgttttgagatgttgtgtttgttttttctttagtttttgaagaagaagaagaagaagaagaagaagaatcttctggtttttgtttttcttctgttttattggttgttttttcttgatcttctttttaattattagatgatttttctttattatctgctttaatttgtctatatttttcgcttgttttgttataagcacttactaaattactatattcttgttctaagttctcttttttgtattctttaaagtcttttgtaaattcactgtatttttgtttgaaatctttaatttctactacttcatttaaagaaggatcattatcattgtaaatttgatcaaattttgcttcattttgcttgaactttgattttaaacttgttcatttttcttctaattctctatagtgaagtaaattagatttagctgaatccagcttgtttttgatatctagtgcttttttatcgggattagacaaatcagagtttatttctgaaacttgttttagtaaaaaagctaaatttatatctaaaaaattaccattaactaattcttttttatcataatatgtttgtagttcagtttttttgttatttatatcgttttctaaagtttttaaatctgttgaaattgcttgtttttgccttgcatcttgtttttgattttcagatttggtatcaattgtttgacaagaaacaaaagttagtgtaggaactatacctacaacagaaacaaaagcaaatatattaagtttttttgccatttacttaattatataaaaaagcaaagtacaaagtatagatttaaaattgatgttgatactataataacagcagcaaaaaaaaaaaaaaaaagagcaagtagtgataaaatattatttgtttttttgcttaaaatatttatttttagttaaatttttaattaaaaattccttaaataaacatcattataaatttaaagttatttttatatttaaaaattgttaaattaatctagtaacttgattttttaatttagaaaatttgttaaatttatccttctattcagaataaatttttgtactttataatgtctgttagtttttgattttgataataataaaaaataaaaaaacaagtaaaaatacttgtttttatataaatttattttttaattaaaactaaattggattttttatctaaattaataacatattgttctttttcaattatttcttttgcaatgatttttttagcaacaaaagtttcaatttcttttttgatatatcttttaataggtctagctccaaaattttggtcataagcatttttggaaacaaattcttttatttcagtaccaaagtctacataataagaatttttttcgagtctgttttttaaattatttaattcaagatcaattatttctaaaataacatttttatttaggaaattaaaggaaattatttcatctaatctattgataaattcaggtttgaaataatttaataatctatcttttatttggttgaaatcaagttttttgttttctaaaatttcttttgctcctatatttgaagtaaaaataattattgtgtttctaaagtcaacttttcttcctttggaatcagttaaaaatccattatcaagaatttgtaagaaaatgttaacaacgtcagaatgtgctttttcaatttcatcaaaaagcacaattgaatatggatttagtcttattttttctgttaattgtccaccttcttcatgaccaatataaccaggaggtgaaccaattaatttggaaactgaatgtttttccatatattcagacatatctaatcttataatttggtgttctgaatcaaataaattataagctaaagcccttgctagttcagtttttccaacacctgttggccctaagaataaaaatgaaccaattggtctgttttgatcattaatatttgctttgaatcttaaaattgaatcggcaactaattttattgcttgttcttgtccttttacttttttagcaagattaatctctagatttagtaacttatctttttcagattcaacaagtttttcaacaggaatttttgttcatttagaaacaatatttgcaatatcttcttggttcactacttctttgattaaagtattttcttctttattttcttctagttcttctagttctttttgaagtgcaaacattttgttgtaaacttgaccagcttctacatatttttgttctaaagcaagattatccatttgagtttttaagttattaattgcttcttttttataggatatttcaaaagctttttctttttcttgtactcattttttagttaaagaatcaatgtgtttgttaagttcttctatttctttttcaagtttttcgattttgtttttgtttttggcattatcatcactatttaaagcaattttttccatttgaatataagctaatttttgttttaatttatctaaaacttctggttggtaattcatttggacttttaaattagctgctgcttcgtctactaaatcaattgctttatcaggtaaaaaacgatcagaaatatatctagctgataaactggcagcagcaactaaagcagaatcagtaattctaactttgtggaaattttcaaatctttcttttattcctcttaagatagttatagtatcatccactgttggttcgttgataaatattttttgcattcttctttcaagtgcactatctttttcaatatattttcgatattcgttaattgttgttgcaccgattaatttaatttcaccacgagccatcattggttttaaaatattagccatatccattgcatttccacctgctgaaccagttccgattaataaatggatttcatcaataaacataattatgttgccatcagatttttctatttcttttaaaactaatttaagtcttttttcgaattctccttgataagaagctccagcaattaaagctgtaacatcaagctctcaaatctctttattttttaaattttcaggaatttgtccttgatgaattttaattgcaataccttcaacaatagcagttttaccaactcctggctcacccactagtacaggattgttttttgtttttcttgacaaaatcttaattattcttcttatttcttcatctctgttaataacaggatctaatttattttcttttgctaacttagttaaatttctaccaaatttttctaatacatttgtgttgtcttgatttatttgcatatctacccccttagtaatgtagaaattataccataaagttggcactctagaagtaaaagtgccaaaataattttgttgatttttgaaataaagttacaaaataagatagaattaactaaattgaggaaaaaaaatatgaaaaaatcaataaaaaataaacttttaagctttttaacgctaacttcatttagttccattatttttttagcatcttgtactaataaagtagaaaccaaaaccacaaatcaagtaaatcctccttcttttaaggcaaaaacagattctagtacatcacaagacacaacaaaaccaacacaagagccatctaaagtaagtgtgagttcagaaaatgatttgtataaaaaagatgataattatgttaaattaggattttgaaatatattaaattatgatgatgatgtaaattctaataaagattcctttgcaaaaacttataaagcacaaatgttagcaaaaactatttcatttaataatgcagacgttgttggtttagtggaagtaaatgctggatcaaataaagaaaatggtgttgatagcattgttaaagatttaaacaatttagataaagaagcaaaatgaacttcaattgtaagtgattctgtatatggtgagggaaatgaatcacaaaaagaaagagttgctttcatttttaagtcttctctttttgatattttagaaattaataaggaaaaattgtatggttctaatccttatttattagtatatgataatccagtttttgactctgttcctgcatattttgcaaaatctaaagtaagtaaaggtaaagcaacatttgatgacaaactaacaactaaaaatgttgattttgctcgtccaccagttgcagctaaatttaaattaaaaaatactgaggaagaatttgttgttgttgcttcacattttgactcacctggagttaataataatccaaccgcaaaaggaaaagaagaaggagaagttgataatactaaatttgattcaagaaatggttcacaagaactttctgaagcaaatcatatgttagaggcgatgaattgatttgaaaataaaacaaatacacaaaatcagttttttatggcagatactaatattaaagaaaaatctaatgacaatgcttttgaacatttgctaactcaatataaacttttaatttcgaaaacaaacaaaaccacactaggtgaaaattttgatacttattcaagctcatatgacaaaattttcttcaaaaaagaaggaaaattaactgttgacaaggtttataaatatcctttatatgatcttataaaagataaattaacttctgaaaatgaattaagtcaagttttagaaaacaagaaaaataaaagtaattcctctaaagatataaaagcaagaattagagattttatttctgatcactctcctgtgtttgtaagtataaaaaaagctttaaaaaacaaacaaaattaattaaaataaaggaaaatatgcaaattaattgatttccaggccatatgaaaaaaggtttggatgaaattaaacaaaaagcaattcttgcagatattttcattgtagttttagatgctcgtgctccacttagtacgtataattttgaatttgataaaattagtccaaataaaccaagattaatacttctaacaaaaatagatttagctgataagcaaaaagctatttcactagtaaataagcattttttaaaagaaaataatattgttctttcaacaaatttaaaggataattcttctaaaaagataattttgaattcattaaaaaaattacaaaaaatcaaaaaagagcaaaatttgaaaaaaggaattttaaattcacaattaagggcttttgtagtcggaattccaaacagtggtaaaagtactttaataaatttattagcaaattccaaagtaaaaacaggaaatatgccgggaattacaagatctcaacaatgaatttctactgataatttaatgctattagatacacctggaattttatgacctaaacttgaaaatcaagaaaatgcttttaaattagtagcaattggctcaataaaacaagaattatttcctttaaattttttatttgaaacaagttataaattactttctagattatatccaaaaagaatagaagaactaaaattaactccaagttcagatgaaatagaaatttattcaaatttggagttattagcaactaatttaaacttttataaaatcaaaaattctaaaactcaagataaaaatacagaattagacttaaatagaactatgcaatgatttgttaattatataaaacagttaaaaaatttaactttcgattaaaaatatagtaaaataattttacaactaaataaaaaaagaaaaaattagtaaaaattcttttatatttttaaaaaaaatgtataattgtaaaacagcaatgtaagctcgagtggcggaacaggtagacgcaagggacttaaaatccctcgggagcaatcccgtgctggttcaattccagtctcgagcaccaatatgcgcccttagctcagcaggtagagcaaatgacttttaatcattgggtcagaggttcaaatcctctagggcgtaccatttcatgatttgaccaaataagaaaaagtgattaatactttttcttatttttttataaaattaaggtaatattcaatcagaaagagaaattatgattaaaaaaataggtatcttaacatctggaggtgatgctccaggaatgaataatgctgttagagcagttgctaaaaaagctttattacacaatatagaacctttattaattaaagaaggttataaaggaattttaaccaagcaaattgttccagcaaaaaattttgatttggataaagcttcttcagaaggaggaacaataattttttcttcaagattcccagagtttcaaaataatttggttagacaagaagcaaaagcaatattagatgaattcggaatccaagcactagtagcaattggtggtgatggaacatacaaaggagcctatgaacttcataaattaggagttaaagttattggtcttccaggaacaatcgacaatgatattcaagaaacagattttacaattggttttgatactgctttaaattctattgttgaatcagttgatagattaagagatacaagtagatcacacaagagatgttttattgttgaagtaatgggaagagattgtcaagacttggcgctttatggtggaattgcaactggagctgaaattattattacaaatactcacattttaactgaagaacaaatcgttaatttagttgatcaacaaatgaatcagcaaggaaaaacaagcacaattgttttaacttctgaacacatttataaagacttaaaagcaattgctaagtttgttgaaaataaaacaggtatagcaactagagcgatgtcactggaacatacacaaagaggaggaagaccaactgcatttgaaagaattttagccactcaaatggggcacaaagcagttgaactacttttagaaaataaatcaggcttagcaatcagccataaaaatggtaaaattgaggctgtagacattaccaaagtgtttgttactaaacaaccccaagacgataaactagtattagaatacaacaaattaaatcaaatttaaaaggaaaatgatgcgtaaagttagaagactagaaatggctaaaagaaaagaagaaagaagattaaaaacttctaagttagccaaaaaagcagcagccaaaaaagcagctcaagtataaaaaataataatataattaagtgcatttatgcacttttttatttttatttttattataaaataagaaattatgagtaaaaaaattaaagttaaattagttgataaagaaagtttaacatttgaattgttagaggatgcaaaaaaaggcgatatatttacactaacagacgaagatagagactgattacaatcaatcgaatcaataattgaacaaaacatagataaatacatatctggtaagaaaaaagaagacttaagacaagaatttttattaaacgatccagaagtcaatagattaagagaacaaataaataatttgagaacatccgaaaacgcttctaaaaataaaattgcaaatttagaaagcggacaaaaaattgaattagataaaaaagatttcgaaattattagcttaaaagataaattaaacaatttaactaattctcttcaagaaaaagaagatgatttacaaaaacgcttccaagaaaaagaagaagatttaaaaaaacactttcaacaaaaagaagagaatttaaaaaataattttgagagagacaaaaaagcactatcggaaagctccgaatctagagcaacccaaaaatatttagaaaaaaaagaagaacttgaaaaacgaatccataaagaaagagaagaatttttcgacaaacaactagaacaatctagacaagattgaaaagaactaaaagaacaagaaatagcaaaatacgaacaaaatttgaaagaaaaagaagaagctattcaagaacttcgagataaattagatagaagacaacatacaaattcaaaacgaattggtgaagacttcgaaaactgattacaaaaaactttttatgaaagtttttctaatttaaatgaaacagttacatatgaaaaaatcactaaaaatgatgctaataatgaaaaagcagatgcattaataaaatttaattttttctcaactgttaaaaaagaaaatattcaagaaactattactattgaagcaaaatctgaatctacttcaggttcacaaaaaaattcttcattttataagaaattagatagaaatagagaacaacaaaaatctaaatatgctattttagtaactgaattagaagaaaaagatgagttttccattaggtcagtatctgaatacaaaaatatgtatgtatgtagacctcaatactttattttattaattaatgttttatttcacttcgcacaaaaagaaagtgaacttacaaatgttgaattaaactttaaagtaaaagaagaaatacaaaaagaatttgaaacctttaaaaaagactcaattgaaaaattagttgataaggtagataaacaacttcctgatatgattaagcaagttgatagtattgaaaaagctcttgaaaaattaaaagaaattctcaatgataaatttgtaaaatatttcaatcaattcaaaaataaattagaagaattaacaataaaaaaatcattgttgaaaaaaatagattctatagcagaagatgatagcaactaaattaagaccagaaaatttagaagaatttgttggtcagccacatttaagaacattactcgaaaaacttatacaaacacaagataaatcttcttttattttctatggaccttcaggaacaggaaaaacttctttagcaattttattagccaaaaatttgaatttaaaatttgatatttttaatgctactatagaaaataaatctgatttgcttcagaaaataaaggataatcaagttgtaattatagatgaggtacacagactcaataaagataaacaagacattttactatcgcatttagaacagggtgaaacaactttttatctttgcacaacagaaaatcctttttttaaaatagtgcctgcaataagaagtagaacttatcttttagaatttaaacctctaagttttgaagatatatttttaagactaagtttatacttaaaaaataacaatttaagtcaaatcatagacgatagtttacttaaatttattatcaggcattcaaatggcgatcttagacaatctttgaataatttatctttaattttgaagctaaataagaagaaaaacatagaaaaagaagacataaaagccattattccatcaatgaatttttattcagatgaaaaaggtgataaccactatgattatttaagtgctttccataaatcattaagaggttctgatgaggatgcttcactttattatggagcaataatattacactcaggagacattgacggcttaatcagaagacttattgctgttgttcatgaagatataggtctagctaatcctttgctttctataaaagttcaaagtgcaatttgagcaatggaaagattgggtatgccagaaatgaaactacctcttgctcatattatttgtgaaattgctttaagtccaaaatcaaactcgacatatttagcttttgaaaaggcacaagagttgataaattcaaaccaaatttataccccgccaaatcatttacgtgattcacattatcaatctgctgcaaaattaaatcgcggtgttggctataaatatccacatgattttgaaaatcactgaatttttcaacaatatatgccagataaattaaaaaatcaagtattatttacatactcaaattctcaagctgaagtaaaatttaaaaaatattgagataatataaagaaaaatgaaggaaataatggattataagaaagtactaaataagtttgtcattaacaatttagaagatttaaaattagccaaaaatgctttttttggtaaagatagctatttagcaaaattacaaaatcaactaaaatctgtttcaaatgaagaaaaaaaagaactaggtaaacaaattagtcaaataagacaagaagctgaaactttctttgcaaatcaagcaaaattacttgaagaaaagaaaattaatgaacaaattgctaaagaatgaattgatataaatttaccaactcaaagttttgctagtttgcatccactaactttaattgaaactagaattagacaatgatttttagcaaatggttatttcgaagttaaagcaagtgaaattgaaaatgatgaatacaattttgaaagacttaacataccaaaaaatcatccagctagggaaatgcaagatagtttatacatagattcaaataatttattaagaactcataataccggtgttagtgcaagaatgttagagcttaacaaaaacaaagcttttagtcaattttgtattggtaaagtttatcgaaatgatgaagatgatcaaactcattcccaccaatttagtcaattagacttcatttctgtaggtaatttgtctattactgatttaattggaactttaaaaagttttttaacttatgtttttgaaacagatttagaatttaaatttagaccatctttttttcctttcacagaaccttctttagaagtagatattttttacaaaaacagatgaattgaaattttaggttcaggaatgattcatccaaatgtgcttaaacaagctggatatactaataattttagagctatagcagcaggtgtaggacttgaaagactagctatgattaaatacggaatagaagatattagagaactttacaaaaatgatttacgttttttaaaacaatttaaataaaaggatttgaaatgattttttctttaaaaaaattaaaacaattagctaatttagataaaagcattactctagaagatgtcacaaaagctataaattctataggttttgagcttgaatctgctacaaagttgaacaatattcaaggaattaaatttggtcacatcattgaactttacaaaaatccaaacgctgataatttaactgtttgtcaaattcaatttgcagataaacaaagaacaattcaaacaagagctacaaatttaaaacaagatgattatgttatggcttttgttccaggagcatcaagcggagaagtaatttttgcagctaaggaattaaaaggaataatttcagaaggaatgcttgtttctttaaatgagttaggttttgattcatctttagtttcaaaagaagtagcagatggaatttttagctttaaaaaagtagatttaaatttagatcctttagattattttgacttagatgattatcttctagatattaagattttagctaatcgtgcagatgcaaattcttatttaattatggcaaaagaattagcagcttattttagaattaattctcaaacaattgttataaaaaataagccaagttttaaatctagctttgtttttgaagactttttagataataaactaactggatttgaagcaaaaatggatgaagattttgaattaagtatccaagatcaattactacttttgaaatcttcaattaaattagttaatcctgtagttgatttatcaaatttaactttaattatgacaggacaacctgttcatgtttatgatgttgataaattaaactcacaaaaacttgttccagcaattaaatcacaagttaaagaaactgttttaggaaataaagaagtagaaatttctaatgctttagtaatttgcaatgaaaatgaagaagttttagcatttcctgcagtaattggacttgaaaaaaacgcagttgataaaaacagtaaaaatattttatttgaaattggaattttcgacactcaacaaacaagaaagactacaaaagaattaaaaataaataatttaacttccaatagagctattaaaaattttgctcttggttcattagatttagctcataaatttttaaaatcatatttaaataatttttcttttccaataaatttagcaacaatttcaaaaaaagaaataacttttgatcttcataaaatgaagcatattgcaggaattgagttttacaaagatgctgattttaaaaatgttcttgtttctttaaaatctttaggttttgagtttgattttccaaataaaaaagtaaaaatccctacttacagatatgatattgaattaaatgaagatatgttagaagagtttttaagattttttggttatacaaaattagaaccaacacttccaaagaattctgtgtttaaaattcaagcttttgatgttttaaaagaacaaattagagcattaggttttaccgaagtaaaaacatatacacttgtttcacaactaaaaaatgagttcaatccttttaattttacagagcaaattaatttatctacttttttatcaaaagaaagagaaacaattagaaacacacaagctatttcaatttctgagattgtagaatacaatttaaaaagaaaaattgaagcagtaagtttttttgaagttggaatgattaattcagaaataaacagtttagtcttagcttcaacagagtttaatttctatcaattaaaacaaaaattattaaacttattttctttagattttgaatttgtccgtacagattcagaacaatttcataatggagtttcagcaaaaatatactataataatgttttattgggatgaataggaaaaccacatccaaagctcaaattagctaatgcattttatttagaaattaatttagacaaacttcaagaatttttagtaaaaaataataaatttcaagcttataatataaacgagttaaaaacaagagatattacttttacattagataaaaaagaatctataaaagacaatattgcaaaacttaaacaaattccaggtattttttcaattagtttaaaagattctatatatataaatgaaaaacataaaattacattacatctagtatgtgatgaaaaatctatagaatttattaacaagatttacgaaaatctgatataatttttttacctgtaaattagaaataaaagcaagtttaataaattttttgataaataaaaaaattctgttataattacattgctttttaaaatttagagtagaaacacaaaggagagataatggcaatagtacctaaacgtaaaacatccaaacaacgtaaacataaaagaagaactcatgatgtattaacatcaccaactttagtaacttgtgggacttgttcaggaaaatcattacctcaccatgcttgttcaaattgtggtttctataaaggtaaaaaagttattgaaggtctacacaaataaattattcttcaaccacaatatgtgctagaaatagcaaaaagccgatttagctcagcggtagagcagctggctgttaaccagttggtcgcaggttcgatccccgcaatcggcgccatattggcccgttggtgaagcggttaacacacatggttttcatccatggattcacgggttcgattcccgtacgggtcaccattttaggaagattagctcagctgggagagcatcgcccttacaaggcgagggtcgtgggttcgatcccctcatcttccaccatatgccgtcttagctcagctggcagagcaactgccttgtaagcagtaggtcgtaggttcaaatcctatagacggcaccatttatgttacttggtagttttaattaggttcgattcctataaaacatacaattaagcgcgagtggtgaaattggcagacacgctagatttaggctctagtgctttatagcgtaagggttcaagtcccttcttgcgcaccaaatgtagaattcacctcctttcttgaatttacacgtcaaaaacaaaaccaagctaaatgcttggtttttctttctttttaaaggtatttatgattaaactactttataaaccaaccaacattacatcatttaagtttattaaaaactatgctagagaaaataatattacaaaaattggacacactggaacattagatcctttagcgtcagggctaatgctaatagcaacggatgaggacacaaaatttataccttatatcgacacacaagacaaagaatatattgttaaattaaaatttggttttatttcagacacatacgatattgaaggtgaaatagaagaattttctcaaaataaagtaactttaaagcaaatagaagaacaattaaaaattttagttgctaaagaagaacagctaccaccagttttttcagctaaaaaagttaatggtcaacgttcatatgatttagctcgacaaaacaagtttttagacttaaaacctataaaaataaaggtattcgaatataatattttaaattttgatcacagccaacaaacacttgaattacaatttagagtctcaagaggaacatatataagaactttagttcacgatttaggtcagatgttgaaaattggtgcaattatggtagaattaacaagaactaaaataaattttttagatttttcttttttaaatcaagatttaaatgttttagatttaatacatttgagtcaaaccaaaatagacaaatttcaattacaacaacttatgcaaggaaaggttgtttcttttgaacaaaattacaaagatcaagaagaaactttattagtatttctaaatcaggcagtaggtattgcaactattaaaaacaagtttttaaaatctataaaactttttggtaataagataaaaataatattaaacgaacaaggaaataaaagtgataagtaaaaatataaaaatatttgccacagatatagatgatacaattttaccttcgggttataaagatattcaaaacgaaataatcgatatgttttctcaacttcaacaaaataatattaaaactatattagtaactggtagagatttagtaactatcggacgacatattaatactccaaatattgattattttattggagcaaatggcgcatttatttatgattttgcaagaaaaaaaataatctgagaaaaggaaattagttttagtgattttaaattaattgaagaatttgcatatcaacaaaatgtagaatttgtaataatggatcataaacatatatattattccgatggacattcagatttaaattcaccgtttttatcaaaacatcaacataaaatgaagtcaataaatgattacactggagaaactccactacatattattactattaaagaaaagtatccaaatcccgagattatgaaaaaatttgcttcatttttaaaggaaaaaaatattcaagcagaaattagttcaagatgaacatacggtttttttatttccccagttaatattaacaaaagtattactttgatttttttagcaactcttttaggatttactaaagaccaaattattgcttttggtgactcttctaacgatgttgaaatgatcagagatgttggttatggagttgcaatggcaaatgctttagatgaagtaaaaaacgttgcaaaagacattgcagaagatacaagagatcttggagtatacaaaaaagcaaaagagttaaaactaataaactaaatattattatgacaaaaatttattcttatcctttagattcgaattttaaatttaacaacgctacttttgttttaggttcttttgaatcttttcacattggtcatcaaaaattaattcaaaaagccaaagaactatcagatacagtagttgtgtgtatgattaaaaatccaattaaattacctaaaagcaatggatttgtattttctgatttggaatccagaatttatgctttagcaaatcaagacattaaaaatattttacttatagattttaatgaagagattcaaaacatgactggcaataattttatagattctttaatcaattcaggtgctagctcttttgttatcggcaaagactttaaattcggtcgttttgggcaatgaaatgcttcaattttaaaagaatattttcaaaacacacatataatagaacacataaaagacagtcaacaaggaataaaaatttctacaaaatttttaaaagaaaatttgaattttggagaaattagtttacttaattcactacttacagaaaactataaaataaaagtaactttagattctgagaaaaaatttcattgacctgatgaaatagaaaaattacacactggtatttatatagcaaattttttatcaattcaagattcagaaaaatatcacggaattttaaaaattgactttcaaaatccttccgtagcagaagtaattttgtttgacttacctcaaatcgaaggaaatctttcaggttttgttgaaatagtaaaagaaattcgtttagtaattcaatcaaaaaataatgaattgacaaattctgatataaaaacagccaaagagcatcatttagaacaactaagagtgtttaaaaaaatttccaattaacaaatttatatttataatttaatgtactatgaagaaaaagaaactatatttaatatcaactttagcattttcaacaattttattagctatttcttgtggtaaagcacaaaccactcctgtagacacacagccacctggaggatctaaagaaaccaagcctggagatttatcaggaaatcaaagttctgatttaaataatagaaaaaatgatgaatcacaatgaccagaaaacgctatagtaggaaatacaaatactacttccccagaagcaggttctgcagaaaatcaaacaaaacctccaacaaatcctgtaaatgatatgaaaatgacgctagaacaagataaaaaagtagttccaataaataaagttgatgaaaacaaacctaaagtagagccaattccaccaaaagaagaaaaaagaagtcaaatcaccaaaactaaagaagaattattagcagaagaaaagaaaaataaagagattcaaaataatctagaattagatttttttaatttagataatgactttttaattgctcatacaccaaaatcttttgacactacaactgctttaaataagttcaaatcagatgaatacaaaaattttgactatagtaatttcgtatctaaattaactacaaatgatgaaaaatttaaacaaaaatatgatgcaaaattagattttacaagcgtcgaagaagataaaactagcaagatacttaaaaatgtaaaattaactgttatttctaaagaaaatccttcattttcaaagcaaaaaaatattaatatttattgagaaaatccaaaagtagaaaaattacaagctttagaatccaatatactagtgcaaactccagtcgctgagttaaaacaactttttccttcttttgtagtttttagtttattgttttctagtgcaacagatggtgtattttctaaattgtatacttctgaaaaaagtatcgtaaatataccatcaattccaagtattaacttaggtttaacaagtgaatttgttaaagtaaaacaagtaggtacagataataatagaaacaaacaatatcaaattaaaattgataaagttaagtttgatgattttacaggtgagttatggctaaaagtgaaattgtacacattagaagacgacgaacctgtttattacaaacaatactattttgacaattttagaaaatgaaaaccaaaatctgattttaaatttcaattaaatccttcttcatctgattttaaaaaaacaagcacatttgaacaacttgtcaaaaaatacaaaacagaattaaaaaataaaaacagtgtaaatataacagataaagaccaattaaatgttctaaaaaattttattattgataaccttacactaacttttccagaaacagaaaaagtttactcattaaataattttaaaatttctaactatcaagcatctgaccctaaaaaaccaaaagaaaaatttattatttatcctttaatttcctttataaattccaattctgtagctgattctagtacttttaaaattgaaaaacaaaacgataaatatctgttaaatattaattcagatattaatatttatcctctcgcattagatcatttttctacactaaaggaactttctagtacgtctgcttcgcctgtttcattcaaggtaacatcatcgattgatgtatctgatattataaaaacaaaccaataataaaataaaatctactgaacttaatgttttagtagattttatttgctaaaatttaaataaaaagttaaaggaaattatgaactcaaaattaacttcaaaacaaattagacaattatgacttgacttttttaaatctaaaaaccatttagaagtcgaaagtaaatctttagttcctgaaaacgatccttcgttattgtggataaattcaggtgttgcaactctaaaagattatttttcaggtaaaaaagtaccacctagcaaaagacttactaattcacaaaaatctttaagaactaatgatattgaaaatgtgggaattacttccagacatcatacaatgtttgaaatgctaggaaatttttctattggagattacttcaaaaaagaagcaattgaatatgcttttgagtttcttactaaagttttaaaatttgacgttaataagctctattttacttattttttggaagatttagatactaaagaatattgattaaaattaggaataaaagaagaacatttaatagcaggaaatagaaaaactaatttttgagatatgggtcttggtccttgtggtccttgtacagaaattttctacgatcgtggttcaaagtatgattcaagaggcattgaattattaaaagaagacattgaaaatgatagatttattgaaatctggaacattgttttttcacaatttaataacgatggagaaaataattacacacctttaattagtaaaaatattgatactggtgcaggtttagaaagagttgtttccattttacaagatggaccaactaactttgatactgatttatttcttcctattattcatcaaatagaaaaaatgacttcttttagatatgatattgaaaattacttcaaaaaagaagaaaaacaatcaaaaattaattcatattttaaaataattgctgatcacattagagctgttgtaaatgccataaatgacggtgttgaaccttcaaatacctttagaggttatatcataagacgactaataagaagagcatatagaacagggaaaaaactaggaattaaagaagcatttttatataaattagttaatgttgttaaaaacactttaatttatgacattgatgttgacagagtaagtgaagtaatcaaaaaagaagaattactttttgaaaaaaccattgaaaatggtgaaatattacttcaaaaagaaattgaaaaaaataataaacaatttgattttgctgtggcttttaaactttttgaaacttttggttttccaattgaattaactcaagaaattcttgctgaaaaaaatattgaattagatatggatcaatttaaaatttatcaagaaagacatgctcaactttctatgggtgaaaaaaaattaggaatgaaaaaaactgttaattcattagcattagttaaggatcaaatttcacaatttataggttattcccatttaaaagctaaagcaaaaatagtatttttagctgatgaagaacaagaaatcgaacaatcttcagagcatcaagaatcttatgtgatttttgatcaaactcctttttacgctactgcaggtggtcaaaaacacgatcaaggttgaatagttcaaaacaataataaaattaaaattaaacaagtgttcaaagacaaatttttaaatcatgttcatgttcttgaaggtgttttagacaaaaatcaagaagtatttcttgaagttgatgaagtaaacagaagaaatcttgaaagaaatcattcttcaactcaccttctttttaaatcattaagagaacaatacggagcacaaataaaacaattaggttctgataacaatgaagaaagattaacttttgattttcctttagataaaaaacctactcaaaaagaattaaatcaaattcaaaatcgtgtaaattcttatataaaagaagatgttgaaagacattatttagaaacttcaatcaaagaagctgaaaaattaaacgctgttatgacacttgaagaagcagaatatatggaccctaaaaatgttagattagttcaatttaaagggattacaactgatttatgtggtggtacccatatagcaaaaactagtttaattgaaagatttaaaatagtttcttgtcaaaataaaggaagtggagttttcagaattagagcaattacaacaaatgaaaaaatttcttcatattgttttgaagcttttaaagagcattgagacactcttatgaaattatgagataaaaatcatcaattagattctacatatcgtggggtttcttccttgaattttagtgatgattgagaattaaggctaaacgaaatcgaacaatatcttgaaaaagcaaaagctgataataaaatattgcaaaaaaaagcttcattagcaaaggaaaatgtagaatttaaacttgattcagctaatattttagaattagaaaatagacaaatttatcttgatttaaatgtagatagtgttcataatttaaaactactagcagtaaatctaagagaaaaatatactaatatagattttgttttaggacaacatcaaaatatgcgtttattaatcacaattgcttcaaaaaacaagcaatctcgcaatatttttgaagaactaaactcactaaattcaattaaaggtggtggaagtgatattttagtccaagctaatatggtttgagaacctgaagtggtttctaaaatcaaacaaatattacaaaatccttcataaaagaaggattttttcaaatattatttttttacattattaaatatataattaaaacattataaaatcaaggcattattatggaagatagatttaagtacctttgtgatttaagttgaatgttttttggcaaagaaagaatagcaaaaactgaatttgtagaatcttgttttttagaaaatattagaattactgatgcatttccaacagacgaaaatggagttcaactttatacagttattttagaaaaaactatttttagtccacaaaataaattattaggtaagataattcaaaataatgaagttatagctgatgtagttggaatttgtaaaaatagttttattcatttgcttcaagaaaaagaaggtaaatatctggatttagaattacctattacattagtagcctataataaaacagaattttgttttggctgaaagacagaaaaaaaatctgtgtttaaccaagaatatatgaatattttgaatattcaaattcaagaaaacattaaaaatttctgatctaatccctatataaattctgatttggattatgaagaaacacctgtatatgttgaattagtaaatcaaataaaaacaagaaagcaatcagaaaatcagactttagtaaatcactttttaataaagaaaaatcacgacttattagatgatattcaaattaaacactttaataatttgtacaataatcgagaattttttaaatcaattcttgacaaaaatgatatcgcttctcaatttttaaaagtaatactttcttatagcaaaattacatatgctattgaaaaaaacaattatgtaaataatgctaagtttgatatctttattgacattagtgtttctgaattaatagatttaaattatttagttttagttggtattgttttaaatccaaatgcaatttttatatttggtcaaagaataagcaagaataaatatattataaaagtttattccaaagatatggcacaagcagaaaaagatattcgcattattttaaaaaatgatatgtttcaagatatgaaaatagaaacttacaattttgattcagaagtttttaaattctcatttgcaatttcttttgaaattgatcactcatcaacaatgcattttgatcaagaaataattagtaaaatagaaaatatattcaaaaatcatttcgataagaaaagacaacgaaaatgaaaaggattatcgcgttagatttaggaagtaaaaattgtggttttgcaatttctgatgctcttagaattacatctcaaccacttgaaaattttcagtttaaagaacataaacttgaactagtaattgaaaaattaaaagattattttgaaaaatatgaaattgaactagttttaattggttatcctttaagtatgcaattaaatcaaacaaaaagttctaaaagagttgattattttgtcaatcttttcaaaacacattttgatattcctataaaattagtagatgaaagacaaactactaaaaaagctcatagtataatgattgaacaaggtttgagtagacaaaaaagaaaaaaaaataaggataaattagctgctcaattaatattagatgattatttaaatcaataaaaagaagaaaaaagaaggaaaatatgaaattaatagttggcttaggaaatccaggtccacaatatgaattaaccaaacataatgtaggttttagagttattgataaattagctcaaagcttaaaaactgattttattaactgacgttctattggattaattattaaaactcaagattatattttggcaaagccattaacttatatgaatcagtcaggattattagttagtgagcttgtgaaattttataaaataaatatagatgatattttgatagtttatgatgatatggattttaatgttggtcaagcaattatgagaacaaatggctcttctgcaggacataatggtttaaaagatatttttagaatgttacaaactcaagaaattaaaagactaaaaattggtatttctcgtgataaaaatagtaaaaattatgttttaactccatttgatccaatacaagaagcaataattaaaaaagtcattgatgattgtgcagatatcctactttattatttatataatgacttccgaaaagcaatagaaaaatttaatgttaaacaaaatcaacaaaaaaataacattactagcagttagtggtggtccagattcaatgtttttgttgaacaaattaaaaaacaaaaacattgtggctgctcatgttaattatcatttaagagctgattcaaatgttgatcaacaaatagttgaaaagttttgccaaaaacataaaattaaattagaaatattatcatctgaaaaaaaatatgaagattatcaaaatattcaacaccaagctagattaattcgttatcatttttttagtcaaatttacaaaaaatacaattgcaaacaattaataattgcacatcaaaaagatgattttatagaaactgtttttcttcagaaaatgaagaaaaaagaagtaaattattgaggtataaagaagaaaaattttctttataatatgaatatcaccagaatttttttgttcaaatattttaaagaagaaataattaatttattaaacaaaaaaaacattcattttgctattgattcttcaaatagtaaagatatttatcaaagaaataaaatcagacataaattagcaacaaaatccaaaatttgaaaaaatttatttattttaaaatatagatttttaaatataattaaaataattaaatttattagaatcaattttttactttctaaatgagaaaaaagcaattttgacattagtttttttgaaaaaatgaagcaaaaatctcaaattttatatttttttattcataaatattattttgatataaatataacaaaggataaattaaaatctatagagagttttttattagcaaaagaaagatcaggaagatatttattaaaaaaagatgtttttttagttaaaaaacaatatagaataattttatagatcaaaaaagctctttttattttataatattatgactaataaccaggaaaggaaactactatggcaaaaaaacccttgaacagaagctattttagatacatttttggagcaataattataggtataatagcggcatttattatataccgtcttcttttgccgtctccaattattaaatctattagctattttgataatcaagtcaaaacaaacgctgcatctacaatagatgaacattttttttgatcagttagttatgatgtagaaaattttagaattaaagttgttaacaatactggagctgcgaattttgctcctgaaatttatcaagtaattgcaaacccatatacaataaatagatatataggatcgttagttcattccgccgatagccaagttcctttaagtgttcaagttacacaagctacacaaagcccttatgttctacaaaatacaaatagtttaaaagattttattgctaatatacaaacagtagcctcaagcaaaaactttgttttaggatctaattgaaaaactcaagttacaaatatttttaatattttagatggtaaattaggtgttgttaatactgacaaaacaagaccaaacttttttgttgcttatattttacctttactaccatatattttctttattattatgttttactttatttgaagaagttacagatcttcaaattcaggtgcaggagggttcttcaatccagggaaaaaccaagctattaaaattacttcagataaaagattttcagatgttgctggaaatatagaagtaaaagaagaaattgaagaatttgttgattatttaagaaatcctaaaaaatatgcatcagctggagcaaaaataccaaaaggaattttattaggtggtcctccaggaactggaaaaaccttaattgcaaaagcaacagctggtgaagcaaatgttccatttttctttatttctgcttctaattttgttgagttgtacgttggagttggagcaaaaagagttagagaattattcaaagatgcacgtgcagaagctccggcaattatttttattgatgagttagatgctattggtcgttcaagaggttcaggaattggtggaggaaatgacgaaagagaacaaacactaaatcaattgctagtcgaaatggatggtatggttgaaaacagtggtttattaattattgctgcaactaacagaacagatgttttagaccctgctttaatgcgtccaggaagatttgatagaacagttatagtaaattatcctgatattaaagaaagagaagaaattttaaaattacacgctaaaggtaaaagaatttcttcaagtgttcaattttcaaatgtagcaaaaagaacaccaggattttctggtgcacaactagaaaatgttattaatgaagctaccttactttctgttagagaaaaaacagatgttataactaatgaacaaattgacgaagcaattgatagagtaattggtggaccggcaaagaaaaacagagtaattactgaagcagaaagaactatggtggcttatcatgaagcaggtcatgctgtagtaggtgttaaaatgagggccggagctaaagttcaaaaaattactattattcctagaggtcaagcaggtggttataatttaattcttcctgaagaagaaaaatataattcaacaaaatccgaacttttagctacaattgctacttttatgggtggtagagcttctgaagaaattcaatatggtaaaaatgaaatttcaacaggtgctgccaacgatatagagaaagctacaaaaattgcaagaaaaatggttactgaatatggaatgtcttctttaggtccaattcagtatgaagaaaatacaggaagccctttccttggtcgtgattatgcaaaaaatactttattttcttcaaatgttgcacatgaaattgatattcaagttagagaaattatttcaaaagcatattctcaagcattagaaataattaaaaataatttagatcttttagaattaattaaagatacacttttagaaaaagaaacaattgttgctgaagaaattgattacttagtaaaacatatgaaacctttagaaactaaggaaaaagaagcggttgtgaaaaaaccagcaaatcaaattttagaagaagttctttcagaatctaaagctaaaagagaacaaaaagaagaaaaagaaaactcaaacaatgaaacaaatgagtaaagttaatatttaaaattcattataaaaagcattaaattgtctaatttaatgttctttttattaaagtaagaaataaaattaaaaggaaaacatgtctataaataaattatcagagcaagaattagtaaggcaaaaaaaagttgagttattaaataaaaaaaacattccagcttattcagaaactaaattagaaaatactaattggcaagaagtagttgctgaatttgatgtttttagtaaagaagaacttgaacaaaaaagtgttaatatcaatgttgcaggtcgtatagttgcaatgcgtggaccttttataattattaatagttattttgataaaattcaactttattatgataaaaaattacttcaaatcgaagaaaataaagacttatttgaacttcttgacttgggtgatattatccaagcacaaggtgttgtttttaaaactaaaaccaatgaattgtctttaaaagtaaataaactacaacttcttactaaagctttaaaacccttgcctgataaattccatggaattaatgatgttgatgaaaaatatagaaaacgttatttagatttaatctcaaatccagaaacaaaacaagtttttttcaccagaacaaaaattatttctttaattagacagtttttagataacctcaattatatggaagttactactccgattttacaatctttattaacaggagctagtgctcgtccctttactactttttataattcgttacatgcaaatttttatttaagaatagcaacagaattaccacttaaaaaattattagtaggtggtttagatcgagtttatgaaattggaaaaatctttagaaatgaaggagtggatacaactcacaatcctgaatttacttcaatagagttttatgaggcatatgctaatttagaaacaatgatggaaagaacagaagcaattttcaaatttttagttgataaattaaacattaaaaataaaaaaattgtttttggtgagtacgaaattgattttaatttaccatttaataaatttgatttagtagataaaacttcggaaattttaggaattaatttaaaaacacaatcatttgaacagttaaaagctattgctcaagcacacaatatcaaaattgaaaaattttatcaatcaggtcatattattaatgctctttttgaagaatttgttgaacccaaacttattcagccaacttttgtttatggacatcctattgaaatttctccattagctaaaaaggatgaaaaagatcctcgtttcacacaaagagcagaactttttattgctaaaaaagaatttgctaatatgtttaatgaattaaatgatcctgaggatcaattacagcgttttgaaaatcaaataaaagaaaaagatttaggaaatgaagaagcaaatgaaattgactatgattttgttgattctttaaaatacggaatgccaccagctggtggctgtggaataggaattgacagacttgtaatgctcttaacttccaaaacatctattcgtgaagtaattttatttccacaattaaaggctaaaaaataatgaaaaaaatatttgtttacgatttagatggtactttgttacaacataataacttgattaatgaaacaacattagcagcgattaaaaaagctcattctttagatcatgttaatataattgcaactggtagaggattaaaaacaactaaagtaatttcagatatgtatccatattttgattatttagtatctaacaatggaacaataatttatgatattgcaaagcaaaaatcctatttaaatgggttcattgatagtaaaactttgcaacttttatttgacattgctctagaatataactgtttaagtgcgatctctactccagatgatgcttttcttttttcaccacaaaaagagtatgattgattatcttcacaagcacaaatggatttaaaagcatataatctaatttcatatgcacaaatgaaaaatcttattgataataatacatcgatttctcaatttgcttttagaaattcagaagctaccactaaagttatttacaacaaattagctgtagagctaaaagataaatataaagtcactattacaaataggatttttgttgatattaatcctttagatgttgataaatttaacggtatacaatttattttaaattctaataattgatcttttgataatgtagttgcatttggagattcttctaatgattttttgatgattaaaaatgctaaaataggctttgcaatgaaacatgcaacacctgatttagttcaagtagctacaaaagttattggtgattgtaattcagatgcaattggtcaagaaattttaaaacttatttaattaattttattttcattttttaaataaaaaagacacaaatatttttgcgtcttaatcaaattaacgataaatcgatatggtgccaacaacagggattgaacctgcgaccccatccttaccatggatgtgctctaccgactgagctatgatggcatatattgtgtttaattatatactaaatcaagaaaatgaagaaaaagaaaggaaaattcaatgcaagcaagttcagatcaaaagttagcaaagcgacaaaaaattagttttgctagtgctttgttaatagttttaggatcttgtattggagcaggaattttttttaagtcaagatcagttcttgaaggctctggatactatctaactttggctatttttgcatgggttttatctagttttgcaattattgcaatggctttttctttgcttgaaatttcttcagtttctactcattctaataattcgttaattgaatgaaataaacgatttaattcacaatttatctacaaattatctcgtaattttataattttcatttacttaccgcttacctatttttcaatgccgctttattttgtgcaaacgctgcaagatgcttatcaagctttttcgttaactccaaatgcagattttcattttcatttagattgatttatagttttaattattgttcttgtttttgtttattattttgctttagttggattaagttctaaattagcaaattgacataacaaaataattttagtgtttaaatttcttccgattattttggttgttgttgtttcatttattatgttttcttcaggtggtgcagctaaactgaattcaaaaccagtttttgtagatattaaagaaatcgtagaaaacaaagaaagtttaaaatatacaattccaggctttggttttgttttatcattagcagcaattttcttcacatatgaaggattttttgcagctacaggaattcaaagcgagatgaaagaacctaaaaaaacacctttggcaattttgtttggattaattattgtaacagttatttatcttcttttagctattgcaatgtcaatagtaggtgatggttcaatttcttcatttatttatgttcttaaaaatgatttaaaatgaaatgatactttaatttctaatgttttaggatttacaaatatttttattgcattgggaattttaggaattttaaatgcttttactttgtgaggaccaaggctagtagaagagttaattttacaaggagattttaaatttttaagtaaatataaaagcaaattaaatgttgaaaaaccaatagtaggaacgataattttgcttcttttttctacagtttttataataattttgtttttaatcggaacatttgcttttatagatgatagtaaatataataattacggagtaagattagatagtctttattcacttgctgatattttaggtaattgatctgcccttatttcttttgcttttataggaatagcaatttttggtggtttaaaaaacaggaagactaataaagtaaaagtaactaaatttaagtattttgttcctttttcaataatttctttagttgtaatttgaataattttaattttttcaattggagttcccattttggatttattagctttattttgaatcaaagatgcacaagatatattagtgcccagacttataaaagtgttgattttagtagcattttttgcaatttcaggaatgccgattttttttgaatacctcaaaaataaacgcaatgttaaaaagaagaaaaatttacaacagagctaataaaaatcaattttaaaaataattattatttttttttaaaatagtgtactatttaaaagaaatgcaaaaaaatcaaatcaatttaatagaatacatcagagatgttaaagatttcccaattgaagggattgtatttaaagatatttcaccacttttagcaaatggagaagtgctaaattacacaattaatcaaatggctgagttagctaaagatgcagatgttattataggcccagacgcaagaggtttcttgtttgggacacctactgcagcttttttaaaaaaaccttttattatggtaagaaaacctaaaaaattaccaggagacgttattagttttgagtatgatttagaatatggtaaatcaactttagaaatccaaactaatatgttgaaaaaaggccaaaaagtagcaattattgatgatgttttagctactggcggaacaatgaaagcgattattaacttaatcgaatctcaaggtgctgttgttcataaagtaatctttttacttgaattaggatttttaaacggaattgaaaaacttaaaaaatatgacgttagctcattaattaaagtttagtactaaaaaattcaatttttatgttataataatttcctacattataacaaactacaattaataaaatccttgatctatatgttgtagatccaataagaccaaaaggagagtacatgtcaaagtacgaaattatgactgttttagctccaggaacagatttaaaagtaattgaagacgttttaaaatctgtttttgatgctaagaacatcgaaaaaattgaaaaacttgaaagaacagagttagcatacgaaattaaaaaacacaaacaaggaatttttgttttagctaacttaaaatctgaggaaagtttaatcgaagaatttgtcagaagagtaaatattctcaaaaaacaagttttaagatttttagttattaatctagattctgaaagaggaatgcacaaaactttcagacctagaaaaaatgataaacacaaatttttctcttctaaaaaaccaacaacttcaacagaagaaggtaaaagttttcaaaaaccatttgtcaaaaaatcttttgttaaaaaatcagaagaaacagattcttcaaaacaaaatgaacaagacaaagtgctaagaaaaccaaaaactgtaaaaccagcaaaagattctaaagtagctcacacagcgaaaaaagaagaaaaaacaacagaaactaaagagtaaaatttatgaataaagtcattttagttggaagaatagttaatgatttggttttaaatagaactaaatcaggtcttgattatcttagatttaatttagcaattgaaagaagaaaattcagtgcagattctgaagaaatcactgattttatcccagtggtagcttgaagatttcatgcaattaatatttacacactatcaacaaaaggttcattaattttaattgaaggttatttatcatcaggtagatatcaaaaagatgatggaacaaatgtctttactttagatgttgttgtagattcttttagatctttagaaacaaaagaacaattagaacaaagaaaaaagaaaaatgtttctgatacagcaaaaccttctttgaaaaacacttcagaaacagttaatgaacccacttttatcaatgcaaatacttcaaaagctgaaacaatttctgacaatctagcaccaactaatgaatttgaagatgaaactgaggaagatgatgacgatatattcattgattgaaattttagccctatggaaaaataaaaaggaattattatgaacaaaaaaaacaaaaagaaattaaagaaaaaaccttgccacttttgcgaaactcaaacagtttacatagattataaaaatgttgaagttttagaaaaatttgtaaatccacatggaaaaattcaaccttcaagaattacaggatcatgttccaaacaccaaagacaagtatcattagcaattaaaagagcaagaatgatagctcttatggcttttgttggtgaaagagtaagaaggtaaaaattaataaaaaaatttttagttaattctaaaaatttttttattataattgaaattatgtcattaaaagcaggtattgttggatttcctaatgttggaaaatccagtcttttttcagcacttacttcttctcaagttgaaattgcaaattatccctttgctactattgatcctagtgtagcagttgttgaaatcaaagacaaaagattaaacgaaattgcaaaaatagttaatccagaaaaaatagtctatgctactttttcctttgttgacattgcaggattaattgctggagcttcaaaaggtgaaggattaggaaataaatttttagcaaatattcgtgatgtggatgcaataattcacgtggtgcgttgttttgatgataacaaagttattcacgttgctaacaaaatagatccaaaagcagatgttgaagttataaatttagaattaattttatctgatctttcagtagttgaaaatgttttaaaaagagttgctaaacgagcacaaaatacaactgacaaaacacttaaaattgaatatgaattagcaaaaaaaattgaagacattctaacacaaggtcaaccagcaagagtgttaaattacacagaagatgaattaaaaattcttcaaagttgacaacttttaagtttaaaaccagttttatatgttgctaatattgatcaagcttctattcaaaatccgcaacaaaacaaatattatttagaactagaaaaaattgccaaagcagaaaataataaaataattcctatttcagtgcaaatagaatatgagattagtttattaaatcctgaagaaaaagaagcatttttaactgaataccatcttaaggaaccaggtttggaaattttaactagagaagcttttggacttttaaatttagcaaattatttcactgctggtgtaaaagaagttcgtgcttgaacttttaaaaaaggatacactgcaccacaatgcggaggaataattcattcagattttgaaaaaaaatttattaaagtagaaataatatcatataatgattttattgaagcaaaaggtgaaaaaaacgcaaaagaacaaggaaaacaaagactagaaggtaaaaattatcttgttcaagatggagatatttgtaactttaaatttggaaaataaaaattaacaatttaagtcagggggtttagtataatggcagtaccacggactccaaacccgttagtaaaggttcgaatcctttaaccctcgccatatgtaattacatcatgaaaataaacaataatcaaaatcaatcacaaaatcgcaaatcgaataattttagcaattcttttaagaatcaacaaagaacgaatcaattacaaaatcagcaacaaaattcctttacaaatcaagcatattcaaaacaaaattcacaagaaaaatcctttgtaaatcaagcacaattttcggattataagctccaaaatccaaaacaaaattctttcaataatcaacaatttaacccaactccaaaatcaaaacaatttatagattattcaactaatacatcaagtaatttttcatcaaatccaacccaagcaaatgaacaatatactaatcttaaatcagcacaatctcaaaattttgtttcaaataatcaattttcaaatgttacatcacaacaaaatcaacaaaagagtttaaaatcaaatcaatttgcaaattatactcaaaataatccatttcaatattcacaagagtttaatcaacaaaatactagtacatttaatgctccaaattacaaaaactcttttttagaaattcagtatgaaccttcacaatttttagactcaaattcaaatacttttaatacagctccacaaaaatattttttagtagatcaagaagaacaaaaatgaaaaaactttctaaaatatagattttttaagaaaaatcaacttaaaaaagtagattttaaaaattcaacagagcctttttttgttccttttttttcaggtaattcaaatttaatttatcttgaatatggactaggttataacaaaataaacaatatttcacttcataactttgcaaaaacaattttaattggactagaaaaaatctatgataatgctttagctcaaaatgaaattaatattaaagaatctaaatttatacatagaccaattatttttgctcataatttaacttctaaaacaaatatttttaaaaaattctatagaagtttgagacattacaaattaaaaacttattgagttaaaaaatctcaaaaacaagaaaatattgataaagaaactttaaaatattgattagacacaaatatgagtgatgatgtagaaaataaagcaattttagtgttttatttttacaatgatccacattcaaataaagttattttagaaatcagaaatagattattttactttttagaccaagaactctatcatattttttataattcagcaattgaattaatttatcaaagtcataataaaaaattcaacaaaatttctaaatttgaatgaaatcaaaatgtttattatgatatgcaagagcaaaatcgattaaaagaaattagaaatcaatttcaaataagtaatgatgttgcaaaagacacaaaattatttatttctaccaaatctaaatgaagttctttggatttattagagcaacttggttttactattcacaaatctgtaagaccttttagaatttccttgtttttactactttttaaaaaagaatgcgacataatagtgaacgcaaataatttagagcaaattgatttttacattagaaataaatacaaatatgtaaaattaaataactgagatattttattatttttaattgacaaaaaacaacaaacttttaatcaacttcctgattttgaatcattttcaacattggttaatgattctaattcactaacatctcagtttcaatttcgatctacacaaactcaaaatagtaacgtaaatccttcaccatttgcacaaaatccaacatttgaaacaaaacaaccaaatgttattgacaaaacacaacaaagatctcaaaatcctttaaaatttaattcttattttactaacgaaaaccaaataaatcaaaagcaaaatcaagattatattttagtaaattcagaactaccgcttggaatatttgaaaattttaatttttataacgtaaacttcttatcaaatcaagatagtcatttttttagagataaccaacaagaaaaaatcaatatttctttaagtcaaaaaattaattattctttagaaccaattgataatttttcttcaaatatcttcattttacttcatttagttaaatatttgaacaacaataaaaatcaaatatattcacaaattaatgacaaattattatcaaaaacaagtaatacaaaatattgagaatacactatgcaaagcaaattaaatataaaagcattgcaaaattcactctctaaaacaccacatctaaaattaattagcaataatttagaaactaaccaatattttaatgaagttttaatttatgaatttgtcaaaaataattgagaaaatacattgataatttcttataataatataaattactacactaaaatttcttattgagcaaaatatccagacaaaaaagataagaagtttttcaaaaaactaaaaaaacaagtcaaaagcaaaaaggagtaaaatgacaacaacatttaaaaataaaaaatataaattaataacagaattaattaaagtaggaacaaaaattcaattagaattaacagataaaacttttcaacctattacaatttcaaaatttgacgaaaaccttgaaggacaaaaagcttacaaattagctgttttatctgtttttccttcaataaatacttctgtttgtgatgagcaaaccaaaggcattagtgaattagcgcacgaatttaatgatgttagatttatttcggtttcagttgatttaccaagtgcaattggacaatgattgggaatgaatggaaaagacaatatcgaattttattcagatcacagaagaagatcatttgggcaacaagctggatttttaattgatgaaattttcttattaaatagaggatttttaattttagacaaagacggaacagttttagaagtagaagcaaattctgatgttcaccaacaaattgattttaacaaattaaaagagttgattcaaaagcacaaataattatttgaaattaaatttttaaacgaaaaacaaattaatttcttgcaaagagagaattagtttgtttttttatttttattataagtttttaagttttgcttctgttttttaaaaaattttgtataatgaaatggcaattagaaattattgcagaaagaagattcactctcacctgatgaataagtgttcataggtaaaggctacaaaatactaatttgttattatttttaataataatttttgttttgctgagaaagtggatttaccacttttttattttttaatccaaggaggaaaaattatttccaaaccaaatcctaaaaatttttcacgttctaaaccagttcaagaacattgagtaaacagaaatattccatttgtcaaagtttttcttatcggctcagataatgaaaaaattgggataattgaaacaagagaagctattgaaatggcaaaagaacaaaaactcgatgtagtagttctttcaatagataattcaagtggtacaccaagaccaattgctaaaatcttggattatggaaaatttaagtatgaaagaaagaaaaaacaaaaagttgaaaaagaaaaacaatctttcacaaacaatagagaaattcgtttatcttttggaatcaatttaaatgatataaaaatcaaagcaaaaaaagccaaagaatttttattagataacgacagagtaaaagtggctcttcgtcttagagggcgtgaaaatacaagacctgaacaaggtaaattaattttaaattctttttttgatgaagtaaaatcgattgcaaaattaagtaaagaaatgcaatcagttggtaattttttaactcttcatattgaacgtgataagaaaaaattacccaaatttacttcttcaaaacaaataaaggaattaattgattttgaaaaaactataaaggaagaagaaactaatgcctaaagcaaaaacaaaatcagcacttaaaaaaagaattaaagtaactgcttctggaaaaatcaaacacaaacatgcatatcgttctcatttagcacaaaataaatctacaaagcaaaaaagacagtcaagacacgcaacattaatgtcctcttctgattacaaaagaataaaagacttaatttaataaatttatcaatatttttaataattaaaaggagattttaccaatgagagtaaaaggtggaactgtcacaagatcaagaagaaaaaaatgattaaaattagctaaaggttattgaggacacaagtcagtaggttataaagttgctaaacaagcagttgtaaaatcctgaacatatgcatttagagatagaaaacaagttaaaagagattttcgtaaattatgaataagcagaattaatgcagcttctagatcacttggacttagttattcacaattagttaacggacttaaaaaatccaacattgaaattaacagaaaaatgctttctgagcttgcaattaatgaaccagaaacatttgcaaaaatagtatcacaagtaaaaggcacattaaataaaggataatactatggcaagaaaagatgatatcacaggaaaaggtcctttaagtggaaataatcgttcacacgctttaaatgcaacaaaaagaaaattcaacttaaatttacaaaaagtagttgttgaagtaaatggtgtgaaacaaactctaaaagtaagtgcaaaaactaaaaaaacacttagaaaaaaagggtttatttaattcctatttcaaggctatataattaatattttaaaaaagcaaagtaatatttgcttttttattttattttcataaagtcttcataaataatataaaataatttagtataattaaaatactaaatagaactataaaaggagcaaaatgaattttaaatacattaaaaaagatcatgttatgcgttcatatgatgaacaagtaagatttttagatattaatggtaatttaatagataaaaacgttgatactgaattaacaaaagatcaattattagacgcttataaatgaatggtattatcacgtcaacaagatacttatatgactcaattacaaaaacaaggaagaatgctttcattcgcacctaactttggagaagaagctttacaagtagctagtgcttttgcgcttaaaaaagaagattgatttgcaccagcttttagatctaatgcaacaatgttagctttaggagttccaattaaaaaccaattactttactgaaacggacaagaaagaggttcagtaactccagtgggtgttaatgttttaccaattaacattcctatagcaactcaatattcgcatgcagcaggaattgcttatgcagcaaaattacaaggtaaaaaaactgttgctatgtcaattgtaggaaacggtggaacaggtgaaggtgaattttatgaagctatgaacatatcaagcatttgaaaatgaccagctgtatttactgtaaacaacaaccaatgagcaatttcgactcctttcaaatatggatcaggatctaaaactattgctcaaaaagcagaagcagttggaataccaggtgttatagtggatggtaatgatctactagcatcatatgcagtaattaaagaagctgttgaatgggcacgtgaaggaaatgggcctgttttagtagagttcttaacttgaagacaaggtgttcatacttcttcagataatccaagaatttaccgtacagaagaagaagaaaaagaacacgaaaaatgagaaccattccacagaattgaaaaatacttaaaagacaaaaagtacattactgatgaagaaattaaacaaatttgagactcttctttagataaagttaaaacaacttatgaagaatcattaaaagaattagacactcaattagatgaaatttttgaccacacatatgcaacattaactcaagagttaaaagagcaaaaacaacacgctaaagattactatgcaaaggaaggtaaataatttatgtcaacaaaagcattaaataacattggtgcagttacagatgcacttgcattaatgatggaaaaagatccaacagttgttctttgaggagaagacgctggatttgaaggtggagttttcagagctactgaaggacttcaaaaacaatttggaatctcacgtgtattcgatgctccaattgctgaagctactattgcaggtgttggtgtaggtgcagcactttatggattaaaaccagtggttgaaatgcagtttcaaggattctcatatccagcatttcaacaacttatggctcatgcagcaagatatagaaatcgtacaagaggaagatttactgtacctatggttgttagaatgccaatggcaggtggagttagagctctagaacaccactcagaagcaattgaagctttatatgcacacattccaggattaaaagttgttatgccttcaactccttatgatacaaaaggattattaatcgcagctattaacgacccagatccagttattttcttagaacctaagaaaatttatcgttcattcaaacaagaagttccagcaggaatttatgaagttgaaattggtaaagcaaatgtattagtagaaggttctgatttaacattagtaacatatggagcacaagttcacgaagcactagctgctttaaaacaattaaatggagaatactctgtagaattaattgatttaagaacaatttctcctttagatacagatacaattattaactctgttaaaaaaactggaagacttttagttgttcacgaagctgttaaatcattttcagtttcagctgaaattattacaagagtaaatgagaaagcatttgaattcttattagcgcctcctgcaagattaacaggatatgacatcactgttcctttagcaagaggtgaaggattccacgcaattaacgacaaaaaaattctcaacaaaattaaagaagtaatgagcttcgaaggctaaaagaaattcaaggatatttaaaaatggaaaaaagatttgtaactcctctagcaagatcgctagcagaaaaattaggcattaacattgatttagtaaaaggaacaggtccaggtggtagggttatgagagaagatgttattgcattttctaaaaatccacaaccaactccagctgctccagctccagctgcatcagttgctccaatacaacaaaccccagcaactcctaatccagttgcagcttcttcaacttcagaagctcttagtggaaaagtcgaaaaagttgctccaattagaaaagcaattgctagagctatgaaaaattcatgatcttcagttgcttatgttaacttagtaaatgaaattgatgttactaacttatgatatttaagaaaaaaagtagttgaagatattcaaaaaacaacaggattaaaaattacctttttatccttcatttctaaagctattttaattgcgcttcaagagtttcctattttagcagctaagtatgatgaagcaactgaatcacttgtttatccttcaacaattaatttaggaattgcagtggatacagatgctggtttaatggttcctgttatcaaagatgcacaaaacttatcaatggtacaaattggactagaaattaatcgtttagcaaaagctgcaagagaaagaaaaattaaagcatcagaaatgtctggtggatcatttacaattaccaattatggatcagttggtgcattatatggagttccagttattaacttcccagaaatcgctattgctggagttggagctatccaatcaaatgttcgttgagtaaatggacaagcaactgaaggtaaagtaatgcatcttacagtagctgctgatcatcgttgagtagatggtggaacaattggaagatttatttctagagtaaaagaattacttgaaaaaccagaaattttaggtataatttaatttcacaacaaataattaatcgaattttcattttttaaactttgcaactttaaagttgcaaagtttaaaaatatttaaaaacattctaaaaaaatggagaaatatgtttaagtttaaattcgccgatattggtgagggtctacacgaaggagttgtaggtgaaatctttgtcaaagaaggagatatggttaaagaaggagattcattattttcagttgaaactgataaaatgacttcagaaattccttctcctgcaacaggaaaagttgttaaaatcttaatggcacaaggtgatacaattcatgtgggacaagaaatttttcacatcgatgatggaaaaggtgattctgcagaagaagcagcacctgcgcctacaacagaggcacctaaaaaagaagaaccacaagaagaaggtggagcatcagttgttggagaagttaaagtatctaatgaactatttgatttaagtgcttttacaaaacctaaatcaactacaacagcagaaaacaaaccagcaagcgcattaagtagaagagcagcgatgcgtgaaagagctttagcacaacaagcagaagctaaatctaaaggaacaacatactcaggttctgttgatgaagagtttgacgttatcgttattggttcaggtcctggtggttatttagccgcatcagaagcaggacaaaacggtctaaaaactttaattgttgaaaaagaattttgaggtggagtttgtttaaatgttggatgtattccaactaaagcaatgctaaaaagcgttgaagtattagaactagttaaccacgcttctgattatggagtaattgggcacacagttccatttaaactcagttgagaaaaaatgcatcaacgtaaaagagatgttgttgctaaattagtaggtggtgttcaaggaattgtaagagctgcaaaagctaaatcagaagttggagaagctgaatttttagcaagtcatgtaattagagtaaacggaaaagtttaccgtggtaaaaacttaattattgcaactggttctacagatagaaaaattgatttaccaggttttgcacaagcttaccaatcaggtaaagttattacttcaaaagaagcaattaacttagaaaaacaaccaaagtctattactattgtaggtggaggagttattggtgttgaatttgcacaaatatttgcaaccgcaggaacaaaagttactattttacaaaacctaccattaattttagctaaccttgatagtgaaatttcaaagcaagtaagtgctaatttagaaaaattaggtgtaaaaatcgttacaaatgcaacaactcaaagatttgaaaacgatgaagttgtttacacagttgataatcaagaacacagaattaaatctgaacttactttagtttcagttggaagagtaccaaatactcaaggtctaaaagaagttggtcttgaattaggaccaagatctgaattagtagctgatgaattttgtaaaactaatgttgaaggagtttatgcaattggtgatgttagcggaaaatcaatgctagctcacgtagcgtatagacatgctgttgttgctgtggcaaatattgttggtaaaaaagaaaaatactcagataaaactgttccagcatgtatttacacaaatccagaaattgcttcaattggattaacagaagaacaagcgaaagcaaaaggtattgactttattgttggtaaagcttcatatggtcacattggtaaagcgattgctacaaacgaaacacaaggttttgcaaaattattagttgataaagaattcggtgaaattattggtgttcatattttaggagcagtggctacagatattattagtgaattagtagttgctgttgacttagaaactactgtttacgaagttgcagatgcaattcatccacatcctacttattcagaaatagtttgagaagcagctagaaatgcagttgcaaaacttaacagactcaaaaaataattgtttacaaaatatattttaaaaaaaccagaattaattctggtttttttaaaatactgtttagttatttctatacttttttaactcttttttgtgcaaattcagcttctgtaattcctaattttttagcgttatgaatgtttcagaatttttgaactaaaatgaaaccagaagaaagcattgaaataccgtttgctgtagtaacagctgcttgaaatgctacttcagtggatttaatacagaaataaacacctgaaacaaaaaaacataatgatgctaaaaacaaaataataaataaaattttatttaaatgatgagttctcttgaatcttgcgatatttataacctcaggtatggagaaaatagctacacctattgctcctccataagaaagtacttgcataaaaatatctagaccgtcttgcacgtttctcctttgaaattaatattaaaatttatgttttataattattaataattaagtttgaattatacaaaatttttttaaaaaagtaaaatttttattttctttctaaacaaattaaattttcaatgtgaaaagttttaacaaacatattatgaatttcaaaaaatataatcttgtatttgtgctttaatagtgaaaaatcataagcttgagttgcaggattacaagacaaatatataattctttttggatttaaacgtaaaatttcttttattgcagctttttgcacaccttcacgtgctggatcaactattatagtatcaactaaatcatcaaaatcttttaaaaactcaaaaacttctttatttttaaagctaacattatttattttattgattttttgattaaataaagcatctttatgtgcaaatttattttcttcaacagctataactttttttgctttttgagccactaaaagtgaaattgtaccaattccgctataaagatctaaaacaaaatcaccttcttgtacaaagtctataattctttgatatgcatgttgagcaacttctttatttacttgatagaaggaattaatattaattctaaatctcaaaccaagtaaatcatcaaaattaaataattcaatgtcttttttacttccgataattaatttatttaattttcttaaaattattttaccttttaaatttgttttcggtttgatatcagttaacaaaaaatcatctaaataaattttattatgtgttttcttctgatatagtgcaccatcaaataaagtgattttatttctatatctgaactctttgttgccttgaaaatactcaatattaatttctttatctaaatcaattttagctatatttttaaaatcattttttactacatattctttatattcttgctcagctatcaagtccatatgaagtaactcataaccaccaattagttcataattagaaggtaaattataatttcttctttgacttgcttgaacaatttcagcaacttttgcttgatagtaatttttaaattctgcagtgatttcaaaagctacaacttcgcttaaaattacaaaatctaaataaacaattttattattgtaatatcctgcaccttggcctttttggttataaaataaaatctttgtttgtttgatcattttttaattttttaatttttatatattttttaaatgaaagtgcttcttttttctttgttaatcatcattgagacacagtagaactagcacaagcagaagctaatattaatgatttagcaacatttttagtttttaaataattagctataaacacagaacctaaagtatcaccagcaccaactgtggatttaacctttatttttgtttctactcaagatttgtaaaaattttgtttttcatcaagcaagatacaaccttcttgtcctaacgaaagtaaaatgtttttacttcctttggcttggatttgttttaaagtttgcaaaatattatcatcttttgttagtttaaaattagttcttaattcatcaatattgggtttgtaaaaatatggttcaaaagccaaaaatttttcaatattgttcgtatctatatctaaaccaaactttacttgttttttctttagaatttcacaaatttgtgttaataattcttcttctacaacacctaaaatataaacaaaatcgtttttatttaaaaaatttaaaatcttctttaatttatttttttgaaaattactaatttcatttttaggaccatttagttcaaaaaatgaagcattttctgcaaacatttttacattatatctagttgtttttgttttattatttgcaatatttataatatttaaattttctttttgtcaaaatgaagctaaattattaaaagtatcattatcaaaaaaagaaatggcttgatttgtaaaacccattcgatttaggaccacagaagcattaattcctttgcctcctggaaaaatattaaaatttttatatctatttagttgatttatttcaaaatcttgtgtttgaattattaaatcaactgaaggtgaaaaagttattgttaaaaacattgttattaaatattactaaattttaaaaaaaatttataatttaactctaatattaggagtaatttttatgtctaaacttatttttttaaaaccctattttaaagaagttttatgagctaataataatttacaaaaactttataaccttgattttttagcaggagaagcttgattaatttcagcttttgaagatcaagctagtttaattttaaatactgaaataaaagaaaaaaatctttatcacttttttaaaaacaataaagaattttttggaaattatcaaggagaatatccaaacttaaccaaatttattgatgctaaatcagatttgagcattcaagttcatcctgatgataaaaatgcaaaacaacttcacaatagtttgggcaaagatgaatgctgatatgtacttaaaacatcagattttccttttgtcattggttcaaaattaacttcaaaaaagaagataaaacaaaaaattgagaaaaaaatttttgactttttaaactttgtaaatttaaaaacagatgaattcacatatattaaatctggaatgttacatggaattccaaaaaattcatttgtttttgaattacaacaatcatcagatattacttacagattttatgattatgatagaaaaaataaaaataatcaattaagagaactgcatttagatttagcatttaaatctttaaaacctaaattaaaacctaaaatagttagacaaaaaaacttgcttattaaaaataaatatttttatttagaaaaaaatgaaatcaattctaaaattaacaaacgattaaaaaaagactttttctgagccgaagttacagttgtaaaaggtgaaggaaaagttgataattttaatgtaaagtttggagatgtttttttaatcaaaaacaaaacaaaatctttgacttttgaaggaaaaatgacaattttaattaactatgttataaagcaaaaagaacaaaatttgtaaaaatatgttagaatttaaagactatgacttccaatcaaaactatataaattatttagttaattgaataaaaaatcaagtaaaaaaagcaaataagtcaggtgttatagtaggtatttctggtggaattgattcagctttagttgctgttttggcaaaaaaagcttttccaaatgattctctaggtctcgtgatgaaaatcaaagatatgtctaaagatttacaagatattagtaaattagttaaaaaatttgacatacaaacaagagaaattaatttatctaatatatacgaaaattttgttgacactttaaaactcgaagataaaatgtctttagcaaatttgcaaccaagactgagaatgtcgactttatatgcaattgctcaagaaaaaaattatctagttttaggaacagataatttagtagaaatgtacattggatattttacaaaatatggagatggtggtgtcgatcttctaccgattgtcaatttgagtaaaacccaagtttataatttagcaaaagaattaggaattaatgaagaaattctaaacaaagccccttctgctggtttatgagaaaaccaaaaagatgaagatgaaatgaaatttagctacaaagattttgatcaatttttacaagataaatcaaagttaaaaaaatcagttgttgacagaatagaatatttacacgaaataagtcagcataaaagaaacaaaataccaagaccaagtaagaaattaaaggatttttaatatggcaggacattcgaaatgagctaatataaaacatagaaaaggtgctcaagatgcattaagatctaaaatgtttgctaagttttccaaagaaataatggttgctgcagcaaaaggtggatctgatttaaattctaattcagcacttagacttgttgttgcaaaagctaaagccaaatctatgccaaaagctaatattgataaagcaattgcaaaagctactggttcaggaaaagaagggattcaatacaaagaaatttgatattcaggaaaccttccacatggggtaagtataattgttcaaattctaactgataatgtcaatagagcaatttctaatttacaagctatttttaaaagagccaatggtcaaattggaaaacaaaattcaattccttatatttttgaacaaaaaggttattttgagttcgcaaaaacaggaattaacgaagatgaattaatgctttttgttttagacaatggtgcaactgatttcattgttgaagatgaatcatatgtagtttactctgaaccatctgcatttgctaatttaaaaacagaattagaaaaaaaatataatgttgaattcttaagtgttgaggttagttattttccaaatcaagaagtggaattaagtgaaaaaaacactgaagatttattaaataaaattgatacttttttagaagatgatgatattcaaaatgtttttcacaacattaaattaaactaaaataaaaaggcagtaaaactgcctttttatgattaatagacaaaatatataggatttttactagaagcggaattttttgtttcagagttatctcatttaattgtgttttctttggttttaagttcgccagaatgagatgttgctcctttaaacattccaattaaattcatcaggacattaattacagatggtagagctgttaaagttgctgtagcaacagcagctactccagctccagatattgaaaatttttcttcttctgttaatttagtaagtttataattcatttacctcctttcacacttatttgtattaatttttgctataaaatcataaaaaggaaaaaattgagaaaatatgaacaaaaaaatcatttttaaacaagacgcaaaagagattttaaacaatagttctttttattataataatgtgcttgatttatcaagtctagatttagtagaagaaattgcagattttgctttttctgcttcaaaaaaaactatagaaaaagttattttaccaataaatttaaaaaaaataggccaatctagctttatgtataatcaaattaaaaaaatagtttgaaatgacaagattgagcacttgtcatttgcttgttttgaaaacaataaaatacaagatttagtcattcctaactctttaaaatctattgaagagtcttcttttgctatgaatttaattaaaaaattggaaattccagaaactttaactcaccttgaaactgatacattttttgctaatgcaattgaagatttagaaattcatcattttaataataaaatattaaaacaagcattttctagtaacgaaaatataaaaaatattaaactcatttctgattttaaattttttcaaaataaagcagaaattccttttaaatcacttgttttttattttcttgatcatttttctgactatgaaaatgaagtagaactagaaattaataatgaaaatataactatttttttaaaatcattagaaattgaaaatattcaaaaaattattttagaaaatagtaaatctgattcagatgaagtgtttgatttttatgttgaaaaaataaatacagaatttggtcttgaatttaaattaatttcaaaaaaacgatgaaaatctaacttaaaaatactttaaaaatcactaaaaaatattataatttttaagaatttttaaagaaaaaaattacatatactaacaaaggtaactaatgaaagattttattgaaaaaagaactaaaataatagcaacaattggtccttctactcaggattataatttgttaaaaaaattaatccaagcaggagttacaacaattagagctaatttttctcatggagactatgaggaacaaaaagcaaaaattgataatgcaaaaaaaatttctaaagatttaaatattccagtttctattttacttgatacaaaaggaccagaaattagagttggaaaaatgacagatggttcacaattgattgaatcaaattctagagttgtgattttaacttctcaagaagattaccaaaactttttaggaacatcagaagtagttactgtgtcttatgaaatggatcgtgacttaaaagttggtgatcaagttttatttgatgatggtaaattacagtcaacagttgttgacattgaacctaacaaaattacagttttaacaaaaaatgcacatgtattaaaatctaataaaagaataaatcttccaggtgtagaattttctcttccatttttatctgaaaaagacaaaaaagatgttatttttggaattgaacaaggtgttaactatatcgcagcttcatttgttaactcagctgataatgtaagagaattaagacaattattaaatgaaaatggtggttcacatattcaaattatttctaaaatagaatcacatgttggtgttcaaaaaatagatgaaattattgaagaatcagatggaattatgatagcacgtggagatcttggactagaagttccatactatgatgttcctttttatcaaaaaaacattattagaaagtgtagattcgcaggtaaaactgtaatagttgctactcaaatgcttgattcaatggaaaaatcagcacaaccaactagagccgaagtaactgatgtttactgggcaacagaattaggagctgatgcaacaatgctttctggtgaatcagcacaaggacaattcccttatgaatcagtaaaggttatggctactattaacaaaagagctgaaagagagttttacaacaaattattctataaaaaacaactttcagtgatggctaaaacttcatttggaaaaagagcatacattgctcacaaaattgctcattatactttagaaaatgaagtaaaatttgcaattgttttatccagaacaggtcaattattatcaactatagcaaagtttagaccaaacactgctgttatcggaattattaatgatgcaaaattaatcggcggttttggaattacatcctcagtgtttgttgctaatgaatcgttagaattatttaaagaaatcaaagctgattttgcacatgcaagaagagtattaagcacttacggagcagaaccaggtgataaattcttagtagtagaaaatgataaaattgttgaattcacattttaattattaatttactaaatacaaaatccagaagaaatttcttctggattttattattttttcaaatcagataaaacaaaatgaagcaacttactagctaaaaaggttaaattttaattaaacaagttagattattttaattaatcaaaaaccaaataaatcctttaaaataaagcaaaatttagattcaaatattattcagtaattacatactcacaaaaaaaaaaaaaaaatcagattttgaggtgatacccttttcttgaaaaaatttttgagtgttttaattaattataatttgaaatgaatgtttccctaaatttaatgggagacattcattttattttatctttaatttgtttgtaattgtaataataaatataatttgcaattgctttgttaaattgtttaaaagttaaaaattctttttcgcgaccataaaaacattctctttttaatgttccaaaaaacgattcaataacgctattatctaaacaatttccttttcgagacatggactgagttattcctttttgttttaatttttctgaaaattgtctatgttgatattgtcaaccttgatcactgtgaaaaattaaaccttcaagatttttgtgctttgaaaatgctctttgaagcatttttctaatttgctggttattagcgcttgtagacaaatctcaagcaataacttcgccattaaacatatctaaaattggcgataaatatgcttttccaaatggtccgctaaattcagttacatctgtagttcatttttaatttggttgagttgcgacaaaatttctatttaaaatattgtctgcaattttgccaacagttcctttgtaagatttgtatttttttctaggacaaattgctttgagattgaatttttccattaatctgcaaacttttttaagtccaattttatagtctctattattaagttcagcttttattcttctttttccatatctagcattattttctacaaaaataagcttcatttggcttataatttcttcatttttcttgtcaaaatcttcttttttgagttcataataaaaagtagatataggaatagaaaactcttttaatacttgaattaatcgcaggtttttatcagcttttactctattataaattttttttattttttcttgccttggttgatttgagtcaaagatctctaccaaggctcttcactttttttagtacttcattttctttttttaaaagtttattttcttctctaagaagtttaagttcttcatatacagataatgaagaatttgattgatcttgactatcggaattgtttgatacttttgtagatttattattattaatcttagatttcattattggtcttcctttgtttaattctaaaccactaattcccgattctaaatattttttcgctcaaaaagatatttgacttggattaagattattttcaagtgaaattttaacaatttgttcaccagctaaaaatcttttaactatgtttaatctttgatctatagttcactttttatttcgtggttttttcttaagaccttcaactcctaatttgtcataaattttttctcaaaaatttacttgatttaaaaaatttttttgacttgtattagcaaaatcaggctttttaatttcaattccttttttgtatttttttacacattctaatttaaattctaatgaatatttcataaaaaatccccttttctatttttctaggaaaaggggatttgctcatttaataatctgattttttaattgtaataacaaattatttttgaaaatgttcttttttaaatttaattaagtatttttttgtttttttataaatacgattaatttgttgtcttattttcaaagaatggtatttaattttataaactttgattcaaaatcaactaatcataaaaggtacaattgcgattgaaattaaagttattagatttagtaaaataactattgaattggaagtacccgaatagaaaaaaggatgatagaaattcaaaaaaggataaattgttaatccagtgtagaaataaactattttattatcattgtgaaaatttacatttgtatattgtcttacactaaaaaagaaaagtaaacaacaaaataggtaataaccaaatgaataaagaattgggtagataaaagtatattttttaatagaatatgcacattttaaatatttaagacttataaaagataatattggattcactaaatgtacaacaagcgtttgtaatgtttcccaaatattagctttgaaatccaaatgtcaagcaattaaagttcaaaaaactataaatgtaattgttaataaaacaatggatgaaaaaagtcattgaaatttttttctacttggattaagaacataaattaaaagtgcaactgcaaaaataatattagtttgataagtaaaataaaacaaactagatatattttgaaaataaaaaacaaatgaaacaaaataaaatttaggtaaagaaaattcaacgtaatttgtagctatattttttgtaataattacaaaagtagaaataatagctcataaagcaaaaacaaaatttattctatgttctttttttcagtcaattcagaattttagcttcatatttgaagcatttttttctaattttgtttgtgaatttgaatttgtttgcggattttgatttgccataaaaatattatattttatttaattatattaatcttcatcagctttaattgctctttctttaacaatttgatctgaaatttgttttggtgttatttcatagtgatcaaattgcatttgataagttccacgacctgatgtcatagaccttaattgtgttgagtatccaaacatttcagctaaaggaacattagctcttatggtattagctccatctccacgtgtttcttgttcttttacttgtccacgacgacgagataaatctcccataacatctcctgaatattcagctggcacaaaaactgatacatccataattggttctagtaaaacagtaccaattgcatcttttgcttttgtaagagctttagaagcagcaattttataagccatttctgaggagtcaacttcgtgataggaaccatcgtataatgttgcttgaatatcaatcattggatatcctgcaagaattcccatttgcattttttcttcaagtcctttttgaatggatttaatgtattctttaggaatttttccaccaacaattttgtcaatgaatttaaatccaccttcttcgtttggttcgaatttaattcaaacgtgtccatattgtccccgaccacctgattgtttgatgtgttttccttcaacttcagctgatttggtaattgtttcacggtaactaacttgtggttttccaactttagcttctacaccaaattctctctttagacgatctacaattatgtctaagtgaagctctcccataccagcaataattgtttgtcctgtttcgttatctgttcaggttttgaaggtaggatcttcatttgcaagtttttgtagaccaattgagagtttttcaactgcagctttagtagctggctctaatgcttgagaaataacaggttctgggaaaaccattttttctaaaacaaatactttagctttttcagaaataagtgtatctccagttgttgtctcttttaatccaactaaagcacctatatctcctgttctaacttcattgatttcttctcttgagttagcatgcatttctaagattctaccaactctttcttttttgttttttgttgagtttaaaatgtatgttcctttgtttaaaacaccagaataaactctaaaaaatgttaatgaaccaacaaatgggtcattcataattttaaaagcaagagcagaaaattcttcatcatctgaagcttttactgaaaattcttcatcatctgcataagctttaatagcaggaacgtctaaaggtgaaggtagataatcgataacagcatcaatcatttttttaacacctttgtttttaaaactagttccacaaacagctgggaaaaattgtcctgaaattgttgctagtctaattgcttttttaagttgttctacgtttggattgtgtccttctaaaagtaaatgcatcaagtcttcgtcaaaatcagcaactgcctctgctaattccatacgcatcatttctgctttttcttttaattctgaaggaatttcaatttcaaattcttcttcttctttttctccgctgtatttaaatgctttcatttccactaagtcaattaaaccaacaaaatcattttcagaaccgatgtttaattgaatagcaacagcatttccacctaatttatctctaacagatttaactgaagcttcaaagttagctcctgctttgtccattttgttaacataaacaatacgtggaacattgtaatttgtagcttgtcttcaaacagtttctgtttgaggttctactcctgattgtgcatctaaaacagctacagcaccatctaaaacacgtaatgaacgctcaacttcaacagtaaagtcaacgtgtcctggtgtatcaataatattaattcttttaccttttcaaaatgcagttgtagcagcagaagttatagtaataccacgttctttttcttgttccattcagtccatttgtgaaactccatcatgtgtttctccaattttgtgaattttacctgtgtggaataagattctttctgttgttgttgtttttccagcatcaatatgagccataattcctatatttctatagttaactaagtcaaattttcttgccataattatcacctgtagtgagcaaatgctctgtttgcttctgccattttatgtgtatcttcttttttcttaatagatccaccagttttattgtaagcatcaataatttcgttagctaatcttaattccattgttttttcattacgtaatcttgcgtagttaattaatcaacgtagtgaaagtgtttgttttcttcttttagaaacctccataggaacttggtagttggaaccaccaactcttcttgaacgcacttctaattcaggtgtgatatttttgatagcttcatgaaatacttctaaagcatctttatttgttttttcagcaactattttaaaagctgagtataaaatattttgtgctgtagattttttaccatctaacataattgtgttgatagctttagttattaattttgagttaaaaactggatctgctagcacttgtcttataggggcctgttttctacgtgacattttgtctcctttttatttaattatttcttctcttttggttttttagcaccgtatttagaacgaccttggtttcttttagctacaccagctgtatcttgagttccacgaacaatgtggtatctcatccctggtaaatctttaacttttccacctcttattaaaacaacagagtgttcttgtaagttatgaccttcacctggaatataagcatttacttccattccatttgaaagctttacccttgcatattttctaagagctgagttaggttttttaggagtcatagttcctacccttgtacatacacctcttttaaaaggcgcaggtaatgcatgctcttttttctttaatgagttaaaagatttatttaatgcaggagcattaatttttctaactttattaactctcgctccattaactaactgagtttgtgttggcatttttgtcctttctttattttgtttaaataccattagttgatataaaagttgttaaattatacaacaacttagtctagagtatcaaaaaaagttcattttttctaaaaatgcttcatttttaaagcaaatttttaattttttactttttaaaaataatacaaaatttaaaaattacttttctttttaaagatttgataaaaaaataaaagtaaaaaaaacagaattaaactgagcagatcccccttttcctagaaaaatagaaaagggattttttatgaaatattcattagaatttaaattagaatgtgtaaaaaaatacaaaaaaggaattgaaattaaaaagcctgattttgctaatacaagtcaaaaaaaattttttaaatcaagtaaatttttgagaaaaaatttatgacaaattaggagttgaaggtcttaagaaaaaaccacgaaataaaaagtgaactatagatcaaagattaaacatagttaaaagatttttagctggtgaaccaattgttaaaatttcacttgaaaataatcttaattcaagtctaatatctttttgagcgaaaaaatatttagaatcgggaattagtggtttagaattaaacaaaggaagaccaataatgaaatctaagattaataataataaatctacaaaagtatcaaacaattccgatagtcaagatcaatcaaattcttcattatctgtatatgaagaacttaaacttcttagagaagaaaataaacttttaaaaaaagaaaatgaagttctaaaaaagtgaaaagccttggtagagatctttgactcaagtcaaccaaggcaagaaaaaataaaaaaaatttataatagagtaaaagctgataaaaatcttcgattaactcaagtattaaaagagttttctattcctatatctactttttattatgaactcaaaaaagaagattttgacaagaaaaatgaagaaattataagccaaatgaagcttatttttgaagaaaataaagcaagatatggaaaaagaagaataaaagctgaacttaataatagagactataaaattggatttaaaaaagttcgcagattaatgaaaaaattcaatctcaaagcaatttgtcctagaagaaaatacaaatcttacaaaggaactattggcaaaattgcagacaatattttaaatagaaattttgttgctactcaaccaaatcaaaaatgaactacagatgtaactgaatttagcggtccatttggaaaagcatatttatcgccaattttagatatgtttaatggcgaagttattgcttgagatttgtctacaagcgctaacaatcaacaaattaaaaaaatgcttcaaagagctttttcaaagcacaaaaatcttgaaggtttaatttttcacagtgatcaaggttgacaatatcaacataaacaattttcagaaaaattaaaacaaaaaggaataactcagtccatgtctcgaaaaggaaattgtttagataatagcatcattgaatcattttttggaacattaaaaagagaatgtttttatggtcgcgaaaaagaatttttaacttttaaacaatttcacaaagcaattgcaaattatatttattattacaattacaaacgaattaaagataaaataaaatgaatgtctcccattaaatttagggaaacattcatttcaaattataattaattaaaacactcaaaaattttttcaagaaaagggtatcacctcacttcaaacttctgtttttttatttttatttgtattattttaattcgtcttttagcatctcttttgctttgcttagttcaactgagaaaatggaagtaactccacgtttttgcatagtaactccaagtaactgatctactcttgacattgttcctgaacggtgagtaataattaagaattgagtattttcttttagtaattttaaaaattctacataacgaataacattagattcatcaagtgcagcttcaacttcgtctaaaatacacaatggaattggtcttgcttttaaaatagcaaaaagaagtgaaattgcaataatagctttttctccacctgaaaaaagtcgtaagtttttaattgttttaccaggtggttgtgcagatatttcaacaccagaatttaaaatatcatttttgtctgtgaagtgaatttctgcttttccaccaccaaacattttttgaaataccatattaaattcattatttactaagttaacaatttctgttgttttattgataataattttatctaaatcagaaattgcttcttcaattttggatttagcagtggttagttcttcgatgtattgttttttctcttggtaacgttgatttacttcttcaaattcagtaattgcttctaaattaacgtttcctaattcttttaactcttttttaaggctatcaacaaaatgtcttgcttgttcaatgtctaaatctaaagaatattgttcactagcagcttctaaagttaatttgtagtgctcagaaagtcttttttgattttgctctaccaagaattttgctctgttttgttcagtgatactatctgagtgttgagtgtttaattttcttagtttggcatctaattcttgtttcttggtttctccttttccttgctcactaattaaatttgttagtcgatcttttttagaatttaattcaattgttagagtagaaatttgtttttctatgttcaatttttcagaatcaaaacttaaatttaaactctcttggtcttcttgttgttctttgaaaatttcgcttgcgtttagttttaagttatttaattcttcgtttaagatattaagttttgaatttattgaattagcttcaatttttacttgttggattgttgaattgactgtttcaatttcgttatatattgtttgctgtttaatttttaaatcatgaatttgatcttcagcaaatttaagtgtatttgtgtgttcttttattttgatatcgtaatttaaaatagaagttctttctagttttgaacctccagtaatggttccgcctggtctgaataaatcaccttctaaagaaactatagtgtatttatgatctaatattttagctattctatttgcattgtctacattatcaaccactaagatgtttccaagtaaaaatccaaagagtttgttaaattgagtatcaaattcaattagttcttttgcaacacctaaaaatcctttttgtccttttaaaacaagtaaatgatcttctcttacttctctttctttaatagatgttaaaggaataaaagttgctttacctgaaagatttttctttaaaaagtcaatagcttgaagtacatcttcagatgttttcattactatttgatttaaagcagcacctaaaacagtttcaattgctaaactaaattcggattctactttaaataattcagaagctaatccaatgtaaccatcaaataaaaatgagttatctttaatagttttaattcctttagaaagaaaacttttattttcaaattgttgttttaatatattaatatttgctgcagcagctgtttttttttcaagtaatacaccaatttctttattaatatcattttcttgcaattttaaagaattagcttttgcatttagtcctgtaagttgttggtctagttcaatttctctttgttttgaagcatttatttgtattttgagtgattcaacttgttttttaatttcttcaatttttgttctttgatcaactacaatttcaccactgataattaattttctacgttcttcaattctagcttcttgaaggttgatttcggaaagtgcgttttttaaattgtctaattttgaagtaatttcttggattgaagattcaacttctgttttaaaatgaacagtttgtgaaatactggattcataagtttgaatgttgagttcaagatcatttctttgttgttctacttctaatagtgaagtatttaaattatttaatttttcattgaaaaagtttagatcattaacaattaaacctacttcaactgattcaagagctttacttttttctaaataaatttttgctttagaagcttgtttatcaagcgagtttacttgacgttctaactctttgattgcaccttgtaatttatcaattgcatcatttgttctaataagtttcttttgtgcttcttctttgtctaatttgtattttgaagttccagcagcttcttcaataactgcttttctttgttcaggcgttgcttctgcaatttcagatatagtaccttgggaaataattgcaagtgaagatttagaaattccagattcaacagctaaatttttaatatctttatatctaacaggttgatcattgtaaaaatattcattagttccttgacctcttttaagtaaacgagaaatagtaaaaatttgttctgtttcttcaattgcatcttcatttttgaaggttaattttaccattgctttttcttgaggtttgacagttttggaacctgcaaagataacatcatccatatttagtccacgaagttgttttgctgattgttcacctaatactcatctaattgcgtcattaatattagattttcctgaaccatttggtccaactattcctacaacagaaccatcaaaatttatgctaatcggatcggcgaacgatttaaaaccttcgatttcaattttaataagctttaacatatttgtccttgtttttttgtagagttttaactaaaattttaaggtaaaaaaattattaaaaaagaattctaattatttttctaaatcaaattcttttttaagttttttcaaagattttttagctgcttctaactcagcttctttgatactgtttcctttaccatgtccataaattttgttgtctcaaatcaattcactttcaaaaaatttatctgtttttttagtaatgtacttgatagaactttttgaaaatgattgaataatttcttgaaattctgattttggatctttgattacttttttagattgttttttaactaatgaatgtaaaatttttttaacaaagtcttcaaaagtttttttgtcttgatctaaataaatcgctgcggttaaagattctaaaatatctgctttaatttttgtgttatttagaatttcttcagaaccttttgctacttttaaatatttgctcaattgcaatttgtcagatattttagcaaaggaaacagaacttactatttgtgatctcagaattgttgcatttccttcattttttgcatcaatgtttttaaaaatatacaaagatgtttgcaaatttaaaagtgaatcacctaaaaattcaagcatttcataatgtggtttattaggtcgtacatgatgataagatttatgtgtaaatgcttgttcataaagactaagattatttgcaactatgtttaaatttaataataattctttaatacttgacataattttactcttttaatgtttcttttagtttgctaaaaatttgtgattcaagagctaattttatttgattaagagcaccttcaaaagctttttcatctgaagaactatgagcttttaaaacaataccattaagacctattattcaagctgcacctacatttctgtagtcaaatctttcttttatattactaaatgctggttttaacattaaagctgcaaattgtcttgttgctgtttttttaagttctgattttaataatttaacaaaacttaaaactgtgccctccatagtttttaaaactaaatttccagcataaccatcacttaaaacaatgtcaatatttccttctaaaatgctttttgtttctacaaatcctttatagtttagtgttttatctaattttaataaaatatttgcttctttatgaaagtcaaatcctttgtaatcttcagttcctatatttattaaaccaataataggatttttaactttaaaaaggttttgatagaagattttagcaatttgtgctcattgatgtaaatattcaggttttacttcgatatttgctccaacatcaagcattaaaaagtatttttctttttcgattgtgggaatcataggcataaatgcaggacgttttattcctgtaagtctttttaacattaacattgaactagctaacaataaagaagattctccagcagataaaacagcatctacttgttgttcagctagcatttttaaagcagtattcattgaattttcttcttttactacatcttttgatagagcatcttttttaattgctattccgatttcatttaaaacaaggagattttctggtttattcgctggcataaatttttgaatttgatgtgcatttccaattaatcaaactttgaattttggattttctttagcaaatttgtgtgctgctattgttgcaaattctaaagatccttcattattttgtgcatcaaaagctatgttgtatttcattaaactactcctattaaaaagttaaatattttttgctgtccatttttgacaacaatttctaaatcataattttgttctaaatattcttgaatttctaaagcctcagcttcagttgctaagtcaccgtaataaatgtaaatcatttcagaatcttgagtaattaaggattcaattgtatcgattacaacatcatatgctgttgctttagcttttaataatttgttgttttccatagcaacaaactgatcttttttaactttaacattattaatttttgcatctttacttgcttgaaaaatttctaaaacacgtaatgattgaacagcttcttccattagttctttgttatcttctcatttggtatctttgttaaaatttagcgaagcttcaagaccttgtacttgattttttgtaggaattacaatcacttttttatctgttactatctttgcagcttgttgtgcagctaaaataatgtttgaattattaggtaaaacaaaaacagattttgcatttactgaattaattgcagctactatatcttgagttgaaggattgtcagtttgtccaccttctataataaaatctgttccattttgtttcataattgaaataattccttgtccattgttgcaagaaactagagcggataatgaaggatttgaattttctaaagctgtattgttgttggttgtggaagtagaattttgatttgattgcaaagtcatattttcggattttattttgacaaattcaccatatttttgaagataatttaacattaatccaggttttagtgtgtgcccatgaatttttaaaaaaccttcttgttcaacaataactattgattttacatttttttctaagtcgtgaatgattttatttttgttaaatttagtaggattttttaaatccacaatgcattcagtacaatatccaaattcttcttcatcattgtgttctaaatcaaagattaaatctctttctttttcttcattttttagtctttgaattgcttttccattgacaaaagaattaaatccttcaaatattaataaaattccttcagatcctgaatcagttacaccagattcttttaaaatctttaataaattaggactattatctgttgtttttcttccttgttcaactacaattcgaaaaaattcttgaatagtattagtttcaactattgtcgattttaaagtttgtgatacttcacggatgaaggttaaaatagttccttcaacaggttttaaaacagattgataagctttattttgtgcattttcaaaagcttttactaaatctaaaacattggcttcttttttgttttctaaaatttctccaagacctctaaaaatttgtgaaagaataactccagaatttcctctagcaccaaataacatagcttttgaagttgcttttataatatcggataatgtattggaatttaggtttttaactgcttcataagctgaattaatagtcgccaacatattagaacctgtatcaccatcaggaacaggaaaaacgtttaaagaattaattttttctacattatttgcgagattattcacacccgactcaagtgctcatttaaacatttgagcgtttaaaatcttgtcattcattacattacacctctaatttgtatatttagattttgtaaatcttcattgtgtctttttaaaaagaatttaatctgagttcttaatccttcaattagtattttaatattaactcctacgctaacaaaaattgaaaaggaaatgtcgttttttttatttttttgttctattttgataatagattctgaataaagtgttgatttatttattttggaaaaagtgggatcttcaataatgccaaaagctacaattcctggtgtttgagatattaattcaaaaagttcctgttttagtttttcttccataaaaatcctttattttgcttgctttagtaattaatttttaaaatcatctatcactaaactaaaaacatttgttatatgtggtgcacttgaatgataatgtccaaaactagcttggatttgaacttgttttttaatatcatcaaagttgataacccaatgttggtaagtttgcaatccagttttttcaagagattgcaatgtttttcaaggttcttcaacgtcatttctttttataacttgtataatgtgttttagttctattaaattgtcaacaatagtcctttgaattgcttcattatttgctatttttaacaactgatcaccacttaatttttgatcaggatttgctaatgttattttaaatctttcattatgatcaacaatgtattgcagatcatcaaaaaatatttttttaaattcattgtatgtttttgttttgttgatagcaaatcgaaattgtcttgaattatcttttgcttgtgttggtttgttaggatcgaaattgtcatattgagtgttgttaggattagttgaggaatcttggcttgatatttgtgtatccttacaagaaataaaaaaagcaattggtgttgctgctaaaaaaaataataaaaaaagcttattgagttttcttttcatagatatttttctacataatttatatttttaaatttaaaatgtaatatgaattttaccacattaagtgcttataaatttaacttttcaaatagtaattttatattttattatataattataaaaaatttacccatatgcaaaaggttgtggagtgcaaccttttcttattttattaagaacaataattcaattataaggagcgaattgactttagaaactgcaataattcaaacatttgaaaatgttatttcagctaaatttgaagtagaaaataacatcaaatttttacgagttcaaacaaatttaagagatttgaaacaaattgaggaactaacacgcaaaatttcaaattttattgataattttagctcagataacaatcaattttatttagatgtactctcacaaggaacagatacaaaacttgattttgcaaaattagaaaatcatattaatgaacacattcaagtttgattgaataaagatgaatttgttttaggctatcttttagacaaacaagagaatataattactcttgaaattaatgtaaaagggagaaaaaagaagcaaaattttaatttagaacagattttacaaattaattcgtatataaaaattcaaaagaataaataaggaaaaaaatgaacaaaaaaagaaaaacaaaagatgaaacattaacaattaaaaaatttaattttcaagaaatacttcaagatatttctgagtttagaaaaattgatttaaacaacataaaagacatattacaagattcaatttctagacaaattgtttctaaattagattctgaagctgaaattgaattagtaatagatgaacaaaatccacaagaatttattgttataaataaaaacggaacagttgtcaccgatcaagaattttcagatatgttaacagtcgctcctgaatttactcacacagatatgtctgataaacaaacatcatttcaatctgaaaaaattacttttattcctttatctactgccaaagaaattaatccaaatgctaaagtggatgacacttttgatattccaattgatatttcagaattcgacaaacatatttttgttcctattattcaaacttttaaacaaaaaattcatgaattcacaagaaaactaatttatcaaaaatattttcctttaaaaaattcaataattaaagctacattaatcaaaaaatcacaaaatggttttaattatttactcgaaggtgaaattccagcttatatgccaaaacctaatatttcaaatttcaatattgcattaaatactgaagaagaagtttttatagaagatgttcttgataatcaaaaagattcacaaattattctttcttcaaaggaaggaatgattttaaaagaaaaattaaaaagagaaatcccagaagttgaagcaggaattttagaaattgtaaatgttgcaagagaagcaggtcttagatcaaaagtttcagttaaaaaagttcacgaagatgaaaactctcaaggagttgatgaagttggatctctaataggtaaaaatggaagtagaattgctacaataaataaagaaatacttggagaaaaaattgatatagttagatatgatccaaatattacaaaatacataatcaatgctttatcaccagcaagagttgtttatattgaagaagttaaaaaatctaaaggtcagaaattcttagtagttgttcctacttcacatcaagccaaagctataggaaaaaatgcaattaatgttagattagccaatgaactaactcgtacaaaaattgatatcaaatcttacaaagactatataagtgaaggtaaaacaattactcactgaaatgcaaatgtagaaaatcaacatgagttagaacaaattgaaaaagcaagttcagttccacataaaacaaccgaacataaaaatcatcgttatacaagaaaatctttttcaaatacaaatataatggctgagttcgaaaaagatattgaaaaatacattgaagatttacaaaatgaaagacttctttatgaagacgaagaagaatttgtagaaaatatttctactaaagaaactgctttagaaaaacaagcaaaacctgaaattaaaaagtcagttgatctaacaaaagaagagattaaacaaattaaaaaagaagcaaaatttttcaaaaaagacaatgatttgctttcttatagtggtataaaagatttagacctagatgatttaacttgggatgaagacgaagaggaataattttgaaaatttacaaaagaagatgtatcatcgctagagaacaatttccagttaatgaattaattcgttttgtaatgactcaaaacaaggaaatcaaaatagattttttaaatactaaaacaaggatacctggacgaggagcttatgtagaaaacaaagaagaaaaaattcgtcaagttttagaaaaaaaacttttaaacagagcttttaaaactaatattaataaagaagtttatcaaaaactaagtgcacaaatggagttagaatggcaaaaaaagaaaaaagaaaatcaaatataaatgaaattaaatcacaacttaataatgtaaaagttgaagtacaatcaggagtttttacttttacaggggcaatgttaatttcagaatttgcacaaaaaattaacaaaccagcaactgaaatcatcacttactttttcaaacaaggaaaaatgtataatttaaaccacatcatcaacgaagaacaaattgcagaagtttgtcttgaatatggtttagattttcaaaaagaaaaagaaataaatgcatctaattttatggatgaagtttcaatagttgataatgaacaagaattacagtctcgtccgccaattattacaattatgggtcacgtagatcatgggaagacaacacttttagactatattagaaagtcaaatgttgctagttcagaatttggtggaatcactcaacacacaggagcttatcaagttaaatataacaagaaattaattaactttattgatacgccagggcacgaagcttttacacaaatgagagcaagaggagctaaagtaacagatattgttattttagtagttgcagcagatgatggagttatgcctcaaacaaaagaagctgttcaccatgctcaagcagctgatgttccaattattgtttttgttaacaaaatggacaaaccaaataaagatgttgatagaattaaaaatgagttagttaatttaaatattatccctgaagaatgaggcggcaaaaacatatttgtttatggttcaggaaaaacaggattaggaattaataatctttttgaagctatcttattgcaatctgagattcttgatttaaaagcaaataaaaacagatttccaataggaacagtaattgaagccaaacttcattatggaaaaggaacagtagcaactttaattgtgcaaaatggaactttaaagctcagagattttattgttgcaggttcacaatatggaaaaattagaactttagaagatacaaatggacacgcaatcgaacaagcattaccaggaacacccgttattattactggtttaaattatgtgcctcaagctggagataaattctttggctttcctgaagaaaaatttgcaaaacaattagctgaagaaagaaaattcatgcaaaaacaaagcaaattaattcaaaaaaatagtatttctaaaaacgaaaataaagataaaattataaacttaattattaaagcagatgttcaaggaattgcagaagctattcaaactgttgtagaaaaaatgtcaaataaagaaattcatattaatgttctacactcagctgttggtcttataagtaaatcagatattttattagcacaaacttctaatgcaaagatttttgctttcaatatccaagtgccaaatcaaataaaacaagaagctaaacaagcaggaattcaaattagtgaacatacaattatttacaaaattattgaagaattaaaagctcaaattaaaggtctaagaactattgaatatgaagaagtagaaactggaacagcagaaattattaagattttttgatattcaaaagttggaaacattgcgggatgttcaatgaaaacaggtaaaatgctagctcattctaaagttgcactttatcgtaataataaattaattcacaaaggtaaaatagagtctttacaaagagataaaaatgatgttaaagaagttgttgctggaaatgaatttggaactcatataattaaatttaatgacattcagctgggtgatattatcaaagcatatcaagatgttgaaattgtagagaaagaataaattatgccaaaaatttctattcaaaaaaaagaatcatattatcatcaattaattgctcaaatcattaatgaaaatttgagtgaaaaatttgaagtttcagttacagctgttaaattatcaaatgatggatctcatttacgagtttacttttcttttttaaaaaacgataaaaaatctttagaatatcttgaaaatgccaaaggtttcattaagcataaattagctcagcaatctactacttataaagtacctgagctacattttgagttagatacagtagcaaaagaagttgaaaaaattgataaattaattaaaaaaatacatcaaaatgataaaaaagaaaatcagtagatttaaatcatttttccttctttttcctttatctactattccaattctttcctttatttcttgtcaaacccaagaaagtattcaagacaaagaagaacagcaattttaccaacaacatgatttacttttaaaagaagctaaagaaaaaaatcagtttcaacctttaaaaccagcaattattactgttaataaatcagatacatcaaatcctgattttactactatgctagaaagtgctgtaaaaagtactttttcagttattgatgatgcagataaaacttctgtgtatattaaaacttttaatcttaatgatacaaacagtaactctgaatttgaatctagagatttttctaaactctttaataatttaattgaaaaaggatataaccttttcttttttaattcagatgtattacttgatagatttgtgctatgaaatgtaggtgataatcgagaaacattaaaagaaaaaaatattaaaattgtaaactttgattcacctcgagcacttcaaaaaataggtaacaatgatagtctaatttctttagattttattcctgaagatattaattgaattgcaggttattttgcagcaagttatttagctaaagaatttccagatccaaattgtgacaaaagacaaatttcagtttttaataattattttaacacacatgaaattaacaaaactcttggatttttagctggaattagttattgaaatacccataatccaacactaacatctcgtgtttgacaaacaagagaccaagtggtatttttagataaaaaagatcaagaaaataaagtaatatcaacagaagaacaaataaaaaacttcttaaaagaagaaaaacacaaagattctcaaattctttttgtggctacagattctttagttcctttagtttataaatatgcagatcttaataaacaaaaaattattgtaaatcactataaaaataaagaatttaatccaaaaaatcaaaaaaatcttttaacaattaatgaagatttaaaaaatgtaatttataaaataatctatgatttatatactaaaaaaagcggaacaaatgatagattaattttggatactgataaaaatgtaactgtttttgtttcttataaaaataaattttattcttttgttgaaaacttaaattcaagtgataaagctttgtttgactcagcaattgaaaaatataatgaacttacaaatggttttccattcgctgctactagagctattttagatacaagacaaacagcaactgaagaccttcctagatcattaaaaagattaattactactataaatgaagcaaaacctgcaccaaatcaaaattaatttttattattttttcttcttttatttttaaatttattaaggttttaacttatttttataaaattaatgtaatatgcaaaaattaataaatctacatacaaatacagaatatagttttttacaatcaacaataaaaatttcatctttgattgaatatgcaaagcaacaccaactcaaacatttagtaattacagatagagataatatgtttggagttgcaaagttttacaatgaatgcaaagcaaataatattaatccaattattggtttggatttagaaattaaaagctttcgatttattttaatagctaaaaattatcaaggttttcttcatttgtccttattaagttctaaaaaaatgtcttttaaagagattgaaatagaagaacttgataatgaaaatattattgttattgatcatccaaaattaggtttatatagtaaaacaaagaaaatgcttgaatttagcaactattttgttcattctaatgattcaaaaatagctaattctgtttatgttcaaactagaaatgtattgtatgcgtcagaagaaaaatacttgaaaatccttcataaaatagcagattcttctgaaaaagatgaagctgtagattttattgattttgaaatgtgatatgaacaagtagatgagcaaattattcaaagaacaaattctttagttgaaaacattttaatcgagtttccagaagctaatatgatactgccggattttaaaaatgaagcaaatttaaatcccgatgaatttttacaacagcttctagaaaagcaagtggctaagaaaaaggcagaatttaaaaattttcctaactttaaagaaagattagtttatgaatttaacatcattaaatctttaaagttttcaaattactttttaattatttgagattttcttagatgagctagaaaaaataatatcttaattggcccaggaagaggatcttcttctggttcattaatttcatatttgcttaatataacacaagttaatccacttaaatttgacttgatttttgaacgttttttaaatccaaaaagaatttcaatgccagatattgacattgatattcaagataatcgaagagacgaattgattcaatatattcaacaaaaatatggctatgaaaacacagctttaattataactttctctacttttggtgccaaaatggcattcgctgatgtagctaaaaaattaaaaaatgtgtcaccaacagatgttttagcaattactaaacacattccatttggtcttagtttagaacaagcttacaaaacaaatgcaaattttagagcttatgtagaaaaacaagacaataatggaaattttttatacaaagaaatttttgaaattgctaagtttttagaaggaatgccacgtcaatcaggaactcatgcagctggaattgtaattgcggataagcctttatacaattatgttcctactttaatttctaaagataaatataatcaaactcaatttagtgctgaatttttagaacaattttctttattaaaaattgatcttttaggtttgaaaaatttaacagttgtcaagggaataattaattccattaaccagcactcaaacctaaattttaattttaattcaattccaatttttgacaaaggtacaaatgaattgctaacaagaggaaaaacagttggtatttttcaacttgaatctccagggatggctaacactttaagaaaagttggaattagtagtattgacgatgttgttgctgtaatttctctttttagacctggacctattaaaaacattcctttatatgcacaaagaaagaaaaatgaagcagattatgaaataatttcacaagaatataacgatattttaaaatctacttacggaataattatttatcaagaacaaattatgcaaatttgtcaaactatagctggttttgattttgcaacttcggatttaattcgtagagcaatttcaaaaaaagaagcaaaaaaactatataaagcaaagcaattatttattcaaggtggtttaaataaaggttattcagctgttgttttagaaaaaatattccaacaaatagagtattttgcagagtacggttttaataaatcacatgctgttgcttatgctactttagcttataaaatggcttatttaaaacaaaattatcctttagaattttattcttttttaataacaaatgaagaaggttctcaaaccaatatagctaaatttattaaagaggcacaaccagctattaaatttaaaaaaccaaatattaatatttcaacaacatctgtagtttatgaaagaaaaacatcaacaatttatttaccactgattttaattaaaggtttaggaagtgttgcttgtcaaaaaattcttgaagaaagaaacaaaaatgggctatataaagattttcttgattttgtaattaggatgaaaataattaatatttccaatacaataattacacttttaattaattcaggaacattaagtgaatttggaaatatcccaacgttattagaaaatttagtaaccgctgaatcttataaaatttgtattttagaagatgaaaataaaaatctttattgtgattactctttaattcctggcaaatttgagcttgaaataaaagaggataatttagaacttactatagaaaatgaagaaaaactattgggaatgagctttagttcatttgatcaaaatatagatttaaaaaatccagtattattatcagaattaagtttaaatgttgaatatcgtatggtgctttatgttaaaaaagttgctaacctaacagcaaaaacaggtgcttcaatgaaaaaaattacattaactgattttcaatcaccagatcaagatatttgactttttggaagtaaagtaactttttttgaagctgttaaagaaaaacaatattatgagtttttaattataaaaattaaagataaattaatattacaaaatcatttaaaggaaatgagatatgactaatagagttttgctagtagatggtaatttgttgctttttaaatctttttacgctagttttaatttcaaaggaagtaatatgcacaatagcgctggtcaagaaactaatgcaattcacactttctttttatccctttttaaagttattaaagaactaaaaccaacacatatttatatagcttttgataaaagctcacaaacagagcgtcacaatttattcgctgaatacaaacaaggaagaaaacaagctccagattcacttttttcacaattaaatttagttaaagagttattgagtttagcaaatttaaaatgatcagatgattttgaatttgaagctgatgatctaattgcttcaatgaattatacttttttaaaacaagatcaaaattcaaaaatttttgttttttcgtctgatcaagacttacttcaattagtttctaatcaaacttatattgtagataaaaataaagataattcttttttaattaaaacagctgataatttttttgaattacataatttattacctaaacaaattcctgattttaaagcattatcaggtgatagttctgataatatcaaaggtgttccaggtattggtcctaaaactgcaaaatctttgatttcgcaatttgataacatagaaaacattttagctaatttagatcaattaccttcaaaaatgaagcaaaaattaattgaaaataaagaaaacattattttattcaaaaaacttactactttaaaaacaaacgcaaaatttgattttaatattgcagatatagcacttaaaatttctttaaactctcaattattagatttattaaaacatttagaattaaataaagttatagaacaatttcacgttattgctcaattataaaataaataaaaaacacgaattttttcgtgttttttatttatttatttttgtgattttctatataaaaagtcttttattgccataacaacaccttcttgatcaaaagcactagtgtgatattttgcaaagattttaacatatttattagaatttgccatagcatatgaataacccactaaacttaacatagaaatatcgttttcactatctccaactgccattacattttcaatgttttcttgaaaaatgtttttgcaaacatattcaagtgtataacctttagaaattggtttagttgtgatttctatgtgtgtgtctttagaaaaggaaataataaattcttcatttttttgtaattctaaaaatgcattagctaaatcatttctatgaccataaagttccatttttagtatattatcatgtgttttattagtaaattttacttctgaatgatccaaaagagcatagttaaatacaaaatagttattctctatgaaattgaagcaaaaatactctttattatttcaaaaatttacttgtaaattatgttttttagcaatatctaaaacattttgttgattttgtttgttaaagtaagaaagtatatattctttatcattaactaaatcattaaaaagtgcgccatttgaagagatgatatatttaacttgtaattgttcagccaagtttttaattcttgacataaatggatttccagttgtaattattatttcaaaattcatttcagattttttgtttatgaaaaaattttgtgtttgctttgtaaattcaaatttaggaccataaattgttccatcaacatctgaaaaaatatagtttttattcatagctaaaattatacattatttaaatcttttggctgacaagtattttctaaatagttttaaaatcacaaagatagcaactggactaattattatagaaagaggtatgattcaaacaagattattttgtttattatcttgattattaattttaatttgttctacattagataaattagttattttgttaaagacataaaactgtgtttctcctttaagttttttgctgtctggtttagcttctaatttgatatttagtacatttttagcatctttttcttttaataatgtagctaaaaagtctttttcttttaaagaagaaacataataatctttatcaagttctaagttgaaagattttaattttgaactaactcattttctaatttcttcaataattttatcttctgaattttgtgtaattgataaatcatcaattattatttttgcaaaatctagttttgctttgtcattgaaattaattaattttactttaaaaatcaactcatttttaatatttaactgttgtgagtaaagcacaaattttacaaattcatttttaaaagtttttaacatttcaagagaagtttcaagatgtttaaagtttaaatctgtttctaaaactaatttaaaatcaattagttgtgagattaaagaatctttaataattgttaaaaattgatattcttttgtttgttcataatcaataattaaatcttttaattggatagtttttaaatctaattcttgattttgatagtattgattttcaactttatttaccgctttaataactttaaaattggatgcattttgagcatcttttacttttaaatagactcagttgtttaaaaaatttttgtcttttacaagaacttcttcgatttcattgagttttatttctttattttcgatgaaataatctttatctagttcaaaatcagtgttaatttgttcttgaatatttttttctaaaaatgaaagtatttcatcttttgaaaataaaccattaatatttaattgagttaagttaaagttgtcaaaaatgttgtttttattactatcttgatttgaaacttttgtttcttcttgaaaatgtaagtcaacttttatcaatttatttttgggttcaatgtaaaagccatttttaaattcaggtcttaggctaaatacaaaaagtaagaattttgaatcatattttatatttcaatttgttttatctttgttttcaaaaagaataaatttttctatgtcattgtagacgaatttttgaaaagttgttttttgagctaagttttttattgcttttatatctacatgaggaataatttcttctttattttcttttgcttctgaatccaaagaagagtctaaagtaataaattcattttgaaagtttccatcatttacgttcaattcttttgaattagaaatttgaatttcataaagtccaggtatttcaaaatcttcaataatttttatttcttgattatctgtatttttgttattgataataatattgtttaataactttttcttctcttcttgagttcaagtagaatcttcagtatttaatatttcattgttcgcaaattcattatgttctacattattcgaatttgcgtcatttgaattatttacactagaatttgcagaattttgttgatcattattggattgactagcattgctgctgcttgtgttggaattggaaatgtttctttttgcttgatttttcttttggatttgtctaatagtgttagctacttcttcagtatttattgaaaatatttgtttatttttataagttgttctatcttgattatttcaaataaaatcattaatataatcttttcattttaaaattacttgatcataactaagttgtttaatctgatctaaattgtaattttctttttcgcctagatatgcagctaaatgttgtccgtgtgtagattctcaaaaattgtaaattttagtatttggaaatatttctgaaaataattggttgtttttattttttccaactcaaatgattttaaataaattcattgatctaggatttttatatgaaaagagtcaaattccttcgcttgagaagtaattttcttcaatttgacttattttaaagttatgacctcttcttgataaaggaaaaattaaaggatcataatcaaagtcaaaattatctatatcatttctaactttaaatcttctaaataaagaattagaagaaaaagatttgaaattagctcctttttcaataacactagcttgagctataattccaagatcaaaaagatcaatatcttttattaaattaccttctgctgattgaggatcttgtaaaaattgtgttccattaggaagtgaatttgctgaaaaatcaattcaaacaagttcgttttttgttcctgttgctggatcaattaatttatcataatcaggatttttcatcttttgacctatttcatcaaaaatgaattcacttttgtcattttttaaatattcttcgattttagaacgttgttgaggattggagtcaggttgtcaaccaaaccattttatttccattttgggttgattatttttaattttaataatcatttctcattgtgcaatcatttttttattttcaaaatttgcattttctttatcaaattttacaactttaattttgtatatttcagcaggattgtcaaggttaattagttttaaatcaaattcaaatttttggtttataacatcaactttttcttcatttatatacaaaatttcatcttcttttaatgttgtgttaaaaatcactttaacatttgaatcataaattcaagttccaccatattctcgagaaattggacgatcattttcttctcttactggaacatcatcaactaatttattagaaaaattagttttatcaattgtttttcctggaacaattttgattctttcttgtaaatttttagatttaaaaaattctgtgcttttgtatcgaatatttacattttttattacatatttgtaaacattttgattaaaatcaggttcttgaaaactaacaaataaatcaaagtaatcatcttttttacgcacagaggaaagttcatattttaaggcaaaatcagttttaagagttggttttaaattacttcatcaattacttaatgctttttcaaaataatatttatttgatttgtctcttgaagatacagttagattggaaattccgttgatctcacctgtatctgtgctgatttctaagtaattatttttaaatgttttcttaaaagagtctttaattttctttatttgtgcaagattttcttgatgttttgtgatgtttttctttgctgtgtattcaagatcaaatttagttataaatttaaaataagttaactcatttttttgattatctgggaatcaatttattttgtgtctataaggtggattttctagataaaattgaatatctacatataaatttttaatagtaaaagtattaattttttgttttttagcttgaatttctctattgatttgattaatatagttttgtgcagaacgaaaaatatagcgttttaaataaattccataacttccatctgcagaaaaaatagtattagaaggagtttgatcatttcggtttacaagagcaaaattaatgtcaacatttctaaatgcatcattaacatcatcaacatttacagtataaaaatagagttcagcaaaagaaccatcatcaagttctagaccttttggtttatcatgagagccaaaatattctcttaaatttcaagtaaaagtgtaatttccataatatctttttaaaccatgatttatgttaattttagctccgtataatccagaaactatttctgttacatctcctgaatgtcttcatgtatgtcctttaataacataaggataatttgcagtttttctagatcatcaactagtattatttcgatatttgatagtcggataatattctgaatttggaatgttaaaatttaactgcgatctataatcccctacaatttcagatgatttgaatgtatttacaaaactttgactttgtctatacacaaaatctgtttgcagacttggaatgtattctgtagatgatttgttatcaattattttaatatttgcacttaaaaaaagtacaggacaaattaaactaataaataaaaacagtcaaaattttatttttcaaagacttctaatttaaaataacctccttttcataatcgttgtaatttactcttaaaaagtttttttcattaaaagagctaagcaataataattgtcctctttttgcgtttagaacgaattggctatcaaatttgtttaataaattagtttcttcattttctgaattgtaaagaggattaaaaatttgatttatcattttaatatcatcacctggtaggtgcaaaaagaatttatattgcatattttttaaaatggcttgcgttttattaattaaatcttttgataaagcaaagtcattgatattttgggttgaaagaacaattgatccattaaattttcttattgttttagtggtttgaaaaataaaattaagtgttgttaaattgttggaatcaatgaatttatgtagctcatcaattgctaaaataaattttttattgttaataaaatttttgttaattttattttgaattaggaaaataatcaagaaaaatgaagcatttacaaattctattgagttattttcaacaaaggtttttgtatcaataattgtaaagttatttaaaaaatcaattgttgtgtgattattaaacattttttgataaagtccatcatttgtaaagttagtaataaatcagtttttgatttttattttagattcaaagtatatattttcttcttgctggtttttaaattgtagatttttaatttctcaaataagatcatcaattaggggaaattgattatttgtaagttctaacaaattaatatcaggatcataaaatccaaaattttgatacatatttttaatggccattgttaaaattagttctttttcttcatctaaactaccatttaaaattttgattcattgcaagaacatttggatttgagaattgattaaaaataaattgttattttcatgattatctacaagtgatgcacttatttgtaaaggatttaaagacatattattagaagacaaatctattaatgaagtatttaaaaaggaagaaaaacttgtatattctctttgtggatctaaaattaaaacagaagcattttgtttgatataactatctaaaatgagctttttaattgaacttgtttttccttggcccgatgttccaaaaaagacacaattagagttagtatgtttttcatctctttttcaaatatctaaaataattgctttttgattgtttttacctaaaataaatgaatttttatcaatgtttttttcaaaactaaaaggccaactataggaaatatttcttgatacaaattgcacgttttcatttagtttttcattagctccgaattgcaaactttgaaaagcatccatttgtctaaaaagtagttgatttggtttacatttttctagtttgatttctttgtataatttagcatctaattcttttttaagttggcttcaattttcgttttttgttaagaaaaataaagaagaatcaaaaagtttttgaccttcagtgtttactaaatgcatagtttcatttagtgcttctatttgttgtaaatccttctttgttctataaattgaagtgttgttaaaggacatagaagtcttgatattattatcggctttgtttaaaattttttcatattcattttcttcaattggatttaaatgtcaaataactcatgaagaatcgcaattgaaaaaagagttagctcaagctatgtttaaatttagtgaatattcagaaatagtgcttattttgtaaaattcatcatcaattttaaatttgttaaaaaagaattgtgcttttttaacttttaataaagaatctaaattttcaaattctttttcactaatttcttctttgggtgttttgcttataaatgattgtaaaaattttaatgtttcaagctgatttagtgatttggttgtaataaacaatttgtttaattcatctactatgatttcttcattttgaagtagtttttcttcattttctgcataaattactatgaaatattgatcataactttcaaacacattaatagatgaaatttcttctcaagacttataaagatagttgtaaaaaacattataattttcattttttacatctttatgcttaattaagtcttctatttgattgtttagtgattcaatattggattcataattaaagtttttctttgttttgacaaaactcactttaaaatctaaaatatttaaaatacttacaaaactattcaaaaaaatttgtttttgattttgattttgaattcaaatatttttaccatcaaattcaataacttttaacaacaaattcttcttttttaacttgataattccgtttttatctatagatttgtagatatttatttttgatgagttagcagaagaactattaaatttatattttttattttctaaaagatattttaaaaaataaattaaaaattgtcaaattcgcatatttcaagtaggaacaaaaattaacaaaatcgcaagcaaagcaaatagagcaataataactccaattgaaattaaatctctataaggaacagaagctggaacaatgaatcaaccaagcgagattgaaataacaaaaattaaaaaacaaactataagatctgaaaaataaaaatttttaaaaatatgaattttatttttcttgatagatttaggttgtagcatttatttccttgtacattttgaaaaatttatgatcttgaaaatcaagtttaggaattttataatctttattttcgatatttcattcaacattaaattgattattatattttgcaaacaagtctaaatttaactctggtaaagtttgttgtggtttgtatttatttttttgttcgttgtttacattttgttgattttcagctatattttcggttttatttgttataaaattttttgcatttttaaatacatcttgtgtttgtacaaagtgttcttttagtttgtaattttgattagtaaatttataaactaatttgttcaattgtgtagctcctaataaaccacctatgataaacaagctagtgattatatttttgtcaaaaattccgtaaaaatgtcttagatttcatttgttgattattaaaacataaaattcaaaaagtttaataccaagaacaaaacacataattgttaaaacatttcttataaataaattttttcaaatcttaaatttacgtccattatcgtagatcattgttgaaaaaattattgggctaactgaaaacaaaaccaacatttgaaatgtttgcatcgatacccgaacaatagatgtagccattattttaaaagatcacattccaataagtgctggaaagaacaaaataactgctgatgagccaggaaaagctaaaaacattccaaatgaaggtgcgctatattcttgatttgcaagaaaaagtcaatctggtctaagaattctataaggaatcaaactcataaaaatattatttgctaaattacttttgacatcaaaacttcgtagaataatttcaaagaaattattcaaaactaaaagtgcagaaaaaattattataggtgttagtaaaagaagtacgaaataagaaattatatgtttcaacctagctaaaaaactgtaatttttattttgtattcctttatgaatgcttcattttacaaagacaaataataaaataaaaataaacaaaaataaactaacaattgcaaataatttaaagtaaattgaagtgtttaacttattaaaatcaaaattttcgattttttcgattccaaaaagcataaagttaataaatgaaaaattaacaacttcaaaaagtttagaaactaaacttaatagcgaaaatggtatttgaataaaaatagttcatataaaaacaaaaagtgggaaaaataaagtcttttcaaacattaatttgttaagtttattgcagctttagttgaaatatctactgcatattttatacctattgaaaataaaataatagttataataaacaccacaaaaactatcattatatgaattatgtactgttttcttttttgtccatgtgaataagcaattttaattcctgtataaattagtgcaaacattaaaattagtgcaactagtccactaaatgaagataaaataacataaccaattgaactagcttttgtcgctacactgtttaaaatatctgttgaattatcttcaaataaaacaatatttaaaaaattattcaaaattaacctccttgtatacatcttttacttctgtgattaaattagcgccttgtttaataagttcaacattgccatcattttcaaaattagtatctcctggaaaacaaaatatttctttacctatcattaaaaaatgattaactaaattttggattccgcttgtttttgaagaagaataaacaattagatttttagataaagcagcaactagtctgtttctgttttttaatctattgtaagaaacatatgtatttggatattcagaaagaatcaaaatattttcattatcttgatcaatacgtgaagaaattcaaggattttctacaccattagcagatacaaaaatcaattttccttgattttcaagaaaataattgttaattttttcttctactcctttgtaaccatttgtgacaacaacgtgtcgtttaatgacttctgataaagatttgtctaaataagattgaataatgtcattatattgttcaccaactaaactaattttaggtagttcactttgtaataaattgatgtttcctttgtaaaaaattacaaaaggtggagtttttaaatgtttaaaaacttctggataaacagaatccagcacagtaaaagctttgatgttttttcgctttaattcatccattacagcttgtgcatctgtatcgtctaccctttcgttttcttttagtgcttttagtattttataaaagtcgcctttgtattttttggcaaaataaattaagatagatttcatttttttcctttcacttataatgtctaaaaattagcaaaaagtgataaaagaaaaaatttttataaaaaattggctttttttcctaaaatatataaatattcattatggggaaagaaaataaatatattaaatccatacttgtaaaaaagaaaaaatacaaattctttgataaatttatgtatttttttgtttactttattttattaattactttgggtgtttttaaacgtacagattgaaaaacaagaagttcacaatataaagaattaatttctggttctgtaactaatttatcagcaaattcgattttgattgcaactggacaagctttttatattttgatttcatttattccaataattattatgataatgatgattttaacaaatattacatttacagttaatggttcagaaccgttcaataattttgttaaatcagaaattttaaatagatttattccaggaatcaaaacagctttgcctgattttttagtcactttcaaagatactaattgatccaatattggtattttgtttttagcaatttcaacattgtgaattagtataaatggttattcaaaattaatggcttcacaatcaactatttacaaccataaaaacaaaggaagttgaatttatggtaaattaaaagcactttttattgtaatagcaattgttatttttgttagtttttctttaataataataactccaattatgatgtatttaaaacaagcattaattaattcggaatctgtttatgatgtgcttttttatataatttcttcattttacttgatatttttctttacatctggttgattgttaatgtttaaatgactaccagttttccaactaaaatttaaagatattgttcctggttggataattgcttcactttcttcagctttttttacaattatttttggatatctagtatctaataaatatattaaatatgaaaaatatggttctatggcttcgtttttatatttatctacatttagtctttatatttcttactttttttactttgctttaactattaattattcatatgcacaggttttttcaactaaaacatttaaagcaaaaagatttagtaagtacaaagtagaatatactttataaattaatctttattatttaaaatagatacaaaaaacaaaacaaacaaaaaaaaaaaaaaaaagtagcttgagctacttttttattggaggatttattttttttcgctatacactgaagcgtattttcttttttttctagtttcatattttacaaaaccttcaattaaagaatatagggagtcgtcattacctcttccaacattgaaaccaggaaaaattttggttcctctttgacgaaagataattgctcctgctgtagcgaattgtccatcactaagtttttgtccaagacgtcttcctgcggaatcgcgtccgttttttgtcgaaccacctgctttggtctttgccatatcagtttactatcctttcaattctgttatttttacacgtgtataaggttgacggtgtcctaattttcttttatgagttgattttgcattgtgacggtaaacaacaatttttttgcttttaccttgtttttcaattacgccttcaacatatgcgtttttaactaatggacttccaattttattgttaattaaaacaacctcggagaaacgaactgtatctccttcttttccttgtaatttttctacaaagacagtttggtcttttttaacaataagttgttttccaccagttttaataattgcgaacatggtgtactccttattaaaatggctcatctttgaggtgctatgcttgaatacctttttagaatggttacttaataagtaacagcaaaattatatatcattatttaaaaaaataaattgatttagtgtttttagctagtttaactttgaaaatttaagttatatttgatattaaaaaaatttagttgaatcaaaattatattcaaaatcaaaataattaaaaaaacttatccttctatatatatatatatattgtaataaaaaaagtttgagaagtaattttaaaataaatgaagaattttatacaattttaaccttcattttctttacatttagagatttatattggtaagttaatagaataaatttgaatttttacagaagaaactatactttaaaatcgaattttaactaattactaaatattagttaaaaatcatatttatattaattttaaaataaagctgtaaaaattatgcatacaacaacaatttaataaaattttaaaatagtaattgatacttaaattatttattattttgtaaaaaaatgaagaaaaatgaagcaaaataaacttttgtagttttaaaaattgtatttaaattagttttttgaatttaatttataaaaaaattatccttgttaattatttttacaattttttttgaagattttgtgtataaatcaacaagaaattaaaattagttaaatgatttttgtgctttttaaaaaccaaaatatttaaaacttttaaaagataattttttattttttttctagaatttttttattttcacttttatttatttttattcttttataattacaagatataaaatttgaaaagagaaaaattatgaaaaatttagaatttaaaggaattggagcttcttcaggtgtagtcaaagctaaagtttttaaaatagaagaagtagatattaagattgatcattccaaaattgaagatacagaaaaagaaattgctttatataaaaaagccttggaaaaatctattcaacaaattgaaacaattaaagaaaaagcaaaaaataaattaaaacaagaagaattagatattttagatgcgcacattttaatagctaatgatccaatgattaatgaagaaattattgaattaattaatcaaaaagaaaatgcggttcacgcaacagatttagtagctaaaaagtatattgaaatgtttttgagtatggatgatgaatatatgagaggtagagctttagatattaaagacttaactactcgtattattaaaaatttattaaatattgatttgttagatttgagtttaatttctgaagatataattattgtagctaatgacttaactccttcagatacagctcaattaaattcatatgttaaaggatttttaactaacataggatcaagaacttcacattcagctattatggctcgaagtttggaaattcctgcaattttagctctaaaagatattactcaaaaagttgaaaatggtgatactgtagtaattaacggagacactggaattggtgtaattaatccatcagacaacacaattcaagaatatgaaaagcaatatcaagaatatataaaactaaagcacgaattagaaacttataaaaataaagaatcagtttcaaaagatggtaaaaaagtagttattgctgctaatataggaaatgttgaagatttagaagcagttttacacacaaatgcagatgaaattggtttatttagaagtgaatttctatacatggatgccaataactgaccaactgaagaagaacaatttcaagtttataaaacagttttagaaagaatgaataacaaaaaagttgttgttagaacattggatataggtggcgataagactctaaagtattttaattttgcaaaagaattaaatccatttttaggatatcgtgcaattcgtctttctttggatagaatagatgtttttgtaactcaattaagagctttaattagggcctctgaatttgggaatttagcaattatgtttccaatgattgctacagtagatgaatttttacaagcaaaagcaatttttgataaaacatttttagaagtaaaacaagaatttgttaatgttaaagatgatattaaagtaggaattatgattgaaattccagctgcagcaatgattgctgatcaattagcaaaatatgttgattttttttcaattggaacaaatgatttaattcaatattctatggcagcagatagaatgaatgaaaaagtaacacacctttatcagcctctaaatccttcaattttaaagctaattaaattaacaattgatggagctcataaacataataaatgagtaggaatgtgtggtgaaatggctggagatatttatgcagttcctatcttattaggtatggggcttgatgaattttctatgtcagcaagtagtattttgaaagtaaagaaacttatttctaatacaagttatgaaaaatataaagatctttgagagcaagttaaattagctgatagacaatcagaggttgaaaaaattttaaaaattcatcctaaaagataaataaaaaaagcagttgaaatgaggtgatacccttttcttgaaaaaatttttgagtgttttaattaattataatttgaaatgaatgtttccctaaatttaatgggagacattcattttattttatctttaattcgtttgtaattgtaataataaatataatttgcaattgctttgtgaaattgtttaaaagttaaaaattctttttcgcgaccataaaaacattctctttttaatgtcccaaaaaacgattcaataacgctattatctaaacaatttccttttcgagacatggactgagttattcctttttgttttaatttttctgaaaattgtttatgttgatattgtcaaccttgatcactgtgaaaaattaaaccttcaagatttttgtgttttcaaaatgctctttgaagcatttttctaatttgctggttattagcgcttgtagataaatctcaagataacttcgccattaaacatatctaaaattggcgataaatatgcttttccaaatggtccgctaaattcagttacatctgtagttcatttttgatttggttgagtagcaacaaaatttctatttaaaatattgtctgcaattttgccaactgttcctttgtaagatttgtattttcttctagaacaaattgctttgagattgaattttttcattaatctgcgaacttttttaaatccaattttatagccactattattaagttcagctttgattcttctttttccatatcttgctttattttcttcaaaaataagcttcatttagcttataatttcttcatttttcttgtcaaaatcttcttttttgagttcataataaaaagtagatataggaatagaaaactcttttaatacttgagttaagcgaaggtttttatcagcttttactctattataaattttttttattttttcttgccttggttgatttgagtcaaagatctctaccaaggctcttcacttttttagaacttcattttccttttttaaaagtttattttcttctctaagaagtttaagttcttcatatacagataatgaagaatttgatttatcttgaccatcggaattgtttgatacttttgtagatttattattattattaatcttagatttcattattggtcttcctttgtttaattctaaaccactaattcccgattctaaatattttttcgctcaaaaagatatttgacttggattaagattattttcaagtgaaattttaacaattggttcaccagctaaaaatcttttaactatgtttaatctttgatctatagttcactttttatttcgtagttttttcttaagtccttcaactcctaatttgtcataaattttttctcaaaaatttactggatttaaaaaatttttctgacttgtattagcaaaatcaggctttttaatttcaattccttttttgtatttttttacacattctaatttaaattttaatgaatatttcataaaaaacccccttttctatttttctaagaaaagggggatctgctcaaaaaactgcatttttatttttattgttaatttaaatatacaataataacaaaaaaatagagaaaaattcaatattaaaaacaaaaaaacagttttttgagtttattattcctcattgacaaaaaccttttttaattatgtaaagaagctcaaataatttttattttataattataaaaaatttttatatatttattatataattaattgacaaagttctgctatatagctacttattttataagtgaagacagttcagttttaaaaaaacttttataaaatttatttttgtgctaaaatattcattgcattagactaataagaaatatttatgcaattaccggggggtttgcagagcggccaaatgcgggtggctgtaacccactttcttcggattcgggggttcgaatccctcaccccccaccatattgccccatagccaagcggtaaggcaacggtttttggtaccgtcattcgttagttcgaatctaactggggcagccatatgaaaattcactacagttaacttttattaaaagtcattttttaagagttgactgatttttttttaaaaacaaatatttatcaaattagtttgattaaatttgtttttaaaatgcattctaaagaaaatccccaaaggcaaccatatcttacataattgtgcattggattgtttttttgtatataaaatcttaataaaactagttatattaatgcccactcttaaattatttttattaatgttatctgttcattgtattttgtattattggtttcaaatattgtttaacaactatcaaagatctgatcaatctaagtagtcatttagttgcttaaaattcttttaaaaactcatattattgggttttaattaaattgtgtttgaatggttgctatccattttaggtaatttataataaaacttgtgacttttttaatttatatttttaaaaataaacatttagtaaaatagcaaacaatagctctttaaaattttcatctggttcataatattattgttttgttattttgtaaacaactcattttatataacaatttaaattcttggtatcaagaattagtcattttcttagtttatcacttttatatcccttatatttttaatagtaaattttccatctcttgattttaagtcttcaaagttatagaatttagagaaaaaatttcaatcattttttattctcctttaattagaatcacttttaattaataaacaaatttcctttcttttttaatatacatcagttattctttttttgaaaaggccttttcaaaaaaagaataacattaataaagatcattataatagatgtttaaattatagtttttgatgcttttcattatgttatattaaaaatatggtttattcgtattgataaaaccatcacttttatgtgagttcattccttctttcttactttattaaattaattcattaatatatattgctaaacaaataaaacaaatctcaattgagacaaaaattagtttaaacttttacccatttatataagcttataataattattcatataataatttatatttaattaaaaaatttataaagcaaaactcatattaatttttgagttttgcttttttttatataatttaaatactcttttttcaagagaaaggaaaacaaaaatgaaaaaattagaaaaaattacaccttgaaatgaagattttgctaggtgatatgtagatgttattaaacaagctgaatttatggaatatggtccaattaaaggaacaatttatttcaagcctaattcttttgctctttgagaaaaaattcaagaaaatttaaataaatattttaaacgcgaaaatgttaaaaacgtttattttcctttgttaattccccaaagttttattacaaaagagaaaagtcatgtggaaggttttgctcctgaacttcttacaatcactcacgctggtgaaaaaaaattatcagaagagctttatgttcggccaacttctgaagttctttttgcagattgttttaaaaaggaattagctaataacaatcaattaccacttatttataatcagtgaacttcagtgcttagatgagaaaaaaatacaaatccttttttaagaacaacagaatttttatgacaagaaggccacaccgttcattctaatgctgaagaagcaaaaagattagcaaaaaaaatgataggaatctataaagatttcatagaaaattacttggctattcctgttattattggtaataaaacagaaagagaacgttttgcaggagcagaacaaacttatactgtagaagcaatgatgaaagatggaaaagctttacaaagtggaacttctcattatttagctcaaaatttttctaaaagttttgacattgtttttaaaaatgataaaaatgaattcgaaaatccatatcaaacatcttgaggtgtatcaacaagattaattggtggattgataatgactcacggtgatgatagaggtgtgattttacctccaaaaattgctcctatccaagttgatatcttagaactttttgcaattaaaaatcccattgtttcaattgttactaaacaaatttttgagaaattaaaaataaaatttacactaagaattgattcaacagataatcaacctggatataaagcttcaagatcagaagttttaggaactccactaagaattgaagtaggaccaagagatttagaaaaaaatcaagtaacaattgtaagaagagatactttagaaaaacaccaagtagaagttgaaaaagtatttgaaaaagtagagtttttactagaagaaattcaaaacaatctttataatcaagccaaatcaagattagttaataatattgttactgcttttgattatgaagaatttaaaacaaaaatagcacaaaataaattcgttattattccttttgaaggagatgaagaactagaagaacaaattcaagcagaaacaggcgcaacaactcgatgcatacctttggataaagaatttattaatgttctacaatcagttaaaagtgaatgtatgttcaccaaaaaaacaacaaatagatttgtaatttttgcaaaagcttactaatatttcacttttaaattataatttaattattaaaaagaaaggttatttttaatatgtcaacaaaaattaaagatgttacaaaatctcaaatttttccagcaattaattcagataaattagctcttgtagtatttcatcaaaaaaattgcggtgcttgcattatgcttgaaccagttttagaaaaattagttgaaaaaatggatgttgtagtttacaaagtagatatccacgctgacatgagttatacaagagaagtgggtattcaaggaactccaacaatattagtttacaaacacggagttttatctaatacattagttggatacagaagcttagatcaacttcaaaaagctttataaaagaagtattttaataaaaaaaacacttgaaattgaggtgatacccttttcttgaaaaaatttttgagtgttttaattaattataatttgaaatgaatgtttccctaaatttaatgggagacattcattttattttatctttaattcgtttgtaattgtaataataaatataatttgcaattgctttgtgaaattgtttaaaagttaaaaattctttttcgcgaccataaaaacattctctttttaatgttccaaaaaatgattcaatgatgctattatctaaacaatttccttttcgagacatggactgagttattcctttttgttttaatttttctgaaaattgtttatgttgatattgtcaaccttgatcactgtgaaaaattaaaccttcaagatttttgtgctttgaaaatgctctttgaagcatttttctaatttgctggttattagcgcttgtagataaatctcaagcaataacttcaccattaaacatatctaaaatcggtgataaatatgcttttccaaatggaccgctaaattcagttacatctgtagttcatttttgatttggttgagtagcaacaaaatttctatttaaaatattgtctgcaattttgccaacagttcctttgtaagatttgtatttttttctaggacaaattgctttgagattgaatttttccattaatctgcgaacttttttaaatccaattttatagtctctattattaagttcagcttttattcttctttttccatatcttgctttattttcttcaaaaataagcttcatttggcttataatttcttcatttttcttgtcaaaatcttcttttttgagttcataataaaaagtagatataggaatagaaaactcttttaatacttgagttaatcgcaggtttttatcagcttttactctattatagattttttttattttttcttgccttggttgatttgagtcaaagatctctaccaaggcttttcacttttttagtacttcattttccttttttaaaagtttattttcttctctaagaagtttaagttctttatatacagataatgaagaatttgattgatcttgactatcggaattgtttgatacttttgtagatttattattattaatcttagatttcattattggtcttcctttgtttaattctaaaccactaattcccgattctaaatattttttcgctcaaaaagatatttgacttggattaagattattttcaagtgaaattttaatcattgtttcaccagctaaaatcttttaactatgtttaatctttgatctatagttcactttttatttcgtggttttttcttaagaccttcaactcctaatttgttataaattttttctcaaaaatttactggatttaaaaaatttttctgacttgtattagcaaaatcaggctttttaatttcaattccttttttgtatttttttacacattctaatttgaattctaatgaatatttcataaaaaatccccttttctatttttctaggaaaaggggatctgctcaattcaagtgtttttttattaaataattactaaagattattttttgatattaaagaaaactttttcacctttgtattgagcagttgattgaattgcttcttcaattgctaataatctattatattttgcaattctatctgttctagataatgaaccagttttaatttgtccagcatttacagcaacagctaaatcagctattgtagtatcttcagattcacctgaacgatgggaaataacagttgtataaccagctttatgagctagttcaatagtatccaatgtttctgaaacagttccgatttgatttaatttaattaaaattgaattaattgcttttttctcaattgcttcagctaagattttagcatttgtaacagttaaatcatcaccaacgatttggtgtgttttaccaaatttttgagtaaatctaacaaaaccttttcaatcactttctgccagaccatcttcaactgaaattattggatatgtatgaaataagtgtccaaagtattggatcatttcttctgttgtaaattgaactcttgtaggttcaaatccttgtcttttttcttcaattgcttttttaagttttttaaatgtataaattccatcgtgataaagttcagaagctgcagcatcaatagcgatagcaactgcattttcaccttcagtagctggtctaaatcctgcttcttcaatagctttaactaaaaaatctaaagcttcttcatgtgattttaaattaggtgcaaacccaccttcatcacctacttgtgttccatgacctgcttttttaagtaattttgctaatgtatggaaaattttgtttgctacttgtaatgcttgtttaaaagttttagcgcctaaaggcataatcataaattcttgaaaatctaatgtgttagacgcatgttctccaccattaattacatttaacattggaactggtaattgatgagcatttgttcctcctaaataacgatataaaggaattttaagttcatcagctgcagcttttgcaattgctaaagaaactcctaaaattgcattagcacctaaagcagatttgttttctgttttatctaattgaagcatcatattgtctaattttctttggtttagtacacagtgaccttttagtaatactgcaattttattgttaacgttatcaacagcggtttgaacaccttttccaccaaatcaattagattcataaactgttccaccatctcttaattctaaagcttctctagttcctgtagaagcacctgaaggaacaatagctgagccatgtcctcctgcttctgttcaaacttctacttgaattgttggatttcctcttgagtctagaacttctctagccttgatttttgaaatttttgacatttttctccttgcttgcttttatgtgttcgaaatatatttttaaattatattcttttttattaatttgtaaaataactatgataataatgttgaaaaagcttcatttaaaaacaaatttagttagttttcaacaaattaacaatgaaaatttgaaataaaaaaagaatattggtaaaacaatattcttttttaaaatcttttgtagttgctacttttttaaataaagattttaacttaaaaaaatggggcagatgacggggattgaacccgcgtatgtcggagccacaacccgatgcgttaaccacttcgccacatccgccaattgagcattaacattatactattttttaattaaaaacaaatttattttaaaaattactttaaaatttcatattttttagccaattgttcaaacataagttttatataattcataataaatagtatttttatttttaattatttttgctaaaattttactttatctatgctaatgttagagttaccaattgatattgtaaaattatataaaagtttaaagctaatgtattcacaattagctttttatcttgttgaagtaactcaaaatacatttgataagttccccatctctcttcattagagaaggggttgcaatcctttatataatgaagttttaaattaataacaaataacaaacaaattttttatttttttataaaaattattatattgaaaggttacttatgactaatttcaaaaaagatgagattctaatctctttagttgatgttgaaaaagaatttgatggtaagaaaattcttaatcaaattaatttagatatcaaaaaaggtgaatttgtaactttactaggtccatctggttctggaaaaacaacaattttgcgtttaattggtggttttgaatgaacaactagaggtgaaatcaagttcaatggagttgatataaaagatgttcctcctcacaaaagagatactgccactattttccaagattatgctctttttcctcacttatctgttaaaggaaacattaaatttggacttaaattaaagagatatccacttaataaagaagaaattaaaccagctactttgcttcgtttagaagaaaacaaaaaacaatgagctttaaaagctaaacaaaaaatgaatgaattgaataaaattcaaattgaatatgaaaaacacatagaagatccaagtgtagatgcaaaaacaaagaaaaaatatcaaaattgattagatgattctgattttaaatactcatattgagaaaattttgtaagttctaaagttgaagcatttgaaaaaaaatatttaacaagaaaaattacaaaagaagaaatggaaaaagaaattgcagaaatcattgaattagtgggtttaaaaggaaacgaaaacaaatctatttttgaactctcaggtggtatgaaacaaagagttgctcttgctcgttctttagttattgaacctgaaattgttttattagacgaaccactttctgcattagatgctaaaatcagacaaaaaatgcaagtatttttaaaagacattcaacaaaaacttggtttaacttttgtttttgtaactcatgatcaagatgaagctttagaactttcagatagaattgctgttattagaaatggaaaaatcgaacaatatgataaagcaaaaaacatttatgattatccagttaataaatgagtagctaattttattggcgattctaatttttttcatgctaaatttttaggaaataataaagttttgcttctagataaagaaattaaaactattcattcagaatttaaaacaaaccaaattgtagatgctttaattcgtccggaagatattgatattgatttaaattttggattttttaaaggaattgtagtaaaaaattcttacaaaggttcatattactttgtagatgttaaagtaaatgaaaaaattatttttgtagaaacaaatgataattatgatgtaggtcaagaagtgtttttaaaatgaggtttagatgcaatccatctaatgacaaaagaagatgaatcacttactaactaaactcaaaactaaagtaattaactttgttttagacttcaaatcttcttgaaacttaagattatcactttctttaccatacattatttttagcttcatttttatagtaattccactacttttactctttataaaatcagtttctcctgttgagtttgaaaataattaccaaagcataaaaacaaacttttcagtagttagagaagcaagtacttgattaataatttgacgttcagtatatttagggattttaacagcattaatatgtttaatttttgcacttccttatgctttttttgtttctactaataaatcaaaagctttcaaaatttatgcaatttctttaattgtttctcctttggtaatttttacaattgcaaaagtattttcattaagagctttatttgtagcgatttttgatgatgaagagttaaacaatcaaggatttatgcttcttggattagtgtttttaaactttccttttatggtaattcctttatacactgtttttagagatatgtcaaaaaacctcttagaagcttcagctgatttaggttataacaaatttcaaactttgattaaagtagctttaccatatggattaaaagcgattttttcaggtattgcgctagtatttttgatggcagcaacaagtattgttatttctgataaattactaccaagtggccaacaaaatcaattaattggaaatttcatcaacaatagtgcaaatttagcaaatccatttgatttggctaaaacttcttcacttgttttaattacaattttagttttattaggaatttatggactaatttattttgttccattagctattatgaaatttaaaggagtagaacatgactagaatccttgactatattaaagaaaaagaaatttgaaaaaaaagttatgtttgattaattttaattttattttacattccgataatttttggagcctttttttcatttaatgctccttccaaaaaaggatttatttcaactacttgaaatagtttttcgcttcaagcctttagagatttatcaactaaaaattttgcttctgcattagtaaattcaataattattgcattagtaacggcactaattgtgattattatttctttgataactgtatttgcgctttgaaaacaaagaaataaaactgtaaaatcttatgtcaatatttcttcaaatattccattaattaacccagatgttatcactgcagttgcgatggcaattattttatctttattatttggtactttagtagcaacaaaagaaggtttactaagatctattgtttcacatattgttatgacattaccatatggtattttgcttttgtatccaagaagtgaaaagttttcaaaaactctttttgaagcttcacaagatcttggatataataaatttaaaacctgatttttaatttatttaaaatatatgattcctgcaattattttagcttctgttgttattatctttttatcttttgatgattttatcattacaaaaattacatctaatgctcaaactgtaggtactttgctttatcaaggaacatttaaaacttgagctttattattgggtgcaattatgttgactatgattgtaattggtaatgtgatttgaattagatataaattaaacaaaagtaaaagaggtaaaaatgaaatttaaattaaaatcacgttataaatgaacaattttttccttaattttgcttcttatttcttcacttatgatagcttttaaagtcaatttaccttttagacctttaattatgaattatgaatcctatctctcagagccaggaaaagaagaacttgaaaaagattttgattatagagaatttggtgatgtttcagaatttacaaaagcaattgaagataaaagaaccataggtggcgttggatctgattttcaaattgctcgtttagtccaaaaaaatttaattcaaaaaatagattgatctaaactatttcaaaattcacaaaatgaaaaactcaaaaaaggatttaaaaccccagctaattattattcacttacaaaaaaagaaaaagaagctgttttagcaagaaaaagaagaacttttgagtctttaattcgtcctgaagttgtttcacatatagatgaatatgataaatttttagtagatgaaaaaggaaataaaattgattcagataaagatggaatagcagatcgtttttgagaattttttgttccttattatactcaagataaagttattgcttacacagtaggtgattacaaaaacaaaaacaatgaaatagttgagattaaaccagagttactaaaaaatgaaaaatatagagaaaataaagcatttattcaagaaaaagggattaaattcctggatcaaactgtagcagaaattggtaaaacactaagagaatatggttacaaatattttgaatgaacagaagctatgcgtgataatttattactaggttcagaaaaaataggaaattacaccggaatagttacaaaagataattataaacaacaaattgatggttttgtaagctatataaaagacattactaataaaaattttgcagatttacgctttaattattacagctcttcaggtcttgatttaacaacaaatttaattgatattgagaaaaaaccagaagttggatttatttacaacggagatgctttagatgctcattatagcaaagataattttgattgattaaaagatggaaaaaccattaatatcatcagaccaaaaaataatttaactttattagatggttgaattttactaaaagatataagttctgatgttgttgataagttttacaattctttatacaattcagtttacaaaggtgaagatttaagtgaagatcaaatgtttaaaatggcattagaaaaagcaaaatacaaagatccagaggatgatcaaatcaaatcaggttattatttagattatgaaaaattacctaatttagcaaattttgatttcattaattacactccttcatttacaaacacttttgagttctttaagaagacttatttcaatgataatgttgaaacagttaatgctttagatgataacaatgtcgaaacaggagatgaaattgatttgattaaagataaaaatggtattgtagctgctaatgaaacaactccaacaataacatttgaacaattagctgccactgctgaagaaagagcttcattatttggactcaatatttatctttcacaacaacctaagcaaacaatttatggacaaagaccagaagattttccaaatgataccacttatgatattcactactcttttattgcaccagtagatgaaaatctagattcaaatattagaacttattacataataaaaacaaaatcttaatttttatatataattatttagaaaatttaaattaaggaaaaaatgttaaaagaattattgttaggtataatcatacttatttcgctttgtataatgatactttcattattaatgtcgccacattcaaactcattttccggtgcactagttggttctagtgatcttgatttatttaaagtttccaaagaaagaggctttagaaaatttacaaaatgagctatgttcatatgtggcttgctatttttaacaattgctttaattattagattattataaaatcaattttataaggaatgtcaaaaatgcaaattaataatgaacaactctttgcttttttaaaacaacccaaaagttttatcgaaattgcaagaaaatttaatatcacttttaacgaaaatgcccaattatctagttatttatcacatttactagaatcacatttgatttttaaaaatcacaaaggcctttattttagtccaaaaatattaagttcgcatattggagtttttcactccacacaaaagggatttggttttgttgaattaaaagatcatcaaaattctgtttttattcctgcaaaatttacttcttcagcacaagattatgatgaagttaaaattaatgttttccaagatgagttaaaaccagataaaacttatggcgtggttactaaagtcatttctcgtaaacttaaatttttaattggaaaagtcataaaaaacggtgattattttgattttgaaccatataatagcttcaaaaatgaagtgttttttagatgagtgtcaactaaaaacttagttttaggtgagtttgtaaaagttgaaatccttgaatatcagaaaaagtttttaaaaatagctttagttcaaaatattgcaaatgaaaatgaaaaattttgatatttaaaagttccaattgtagactctggtgttgaagtggaatttaattcaaatattgaagaagaattaaaacaaattccagatgcaattgaaacaattgaaccaaatagagttgatttgagatcttctactattgtaactattgatggagatgatacaaaagactttgatgatgcaatttcagttgaaaaacttgaaaataataattacaaattaggtgtacacattgctgatgttagttattatgttaaagaagatacttttttagatgatgaagcagcaacaagaggaacatctatttatttacctaatatggtaattccaatgcttcctgaaaaattatcaaatggtatttgttcattaaatcccaatttggatagatatacaattacaatggaagctgaaatagataaatatggaaataatcttagtgtaaaaatttatccttcagttattaattccaaagttagattaacttacaatcaagttaataaatactatgaaaatcaagaaattagctttacaaatgaagtaaaattacttttagatgatgctttagaattagctaaaattttaagaaaatacaaagaaaatcaaggttatgtaaatcttgaaattgaagaaacaaaagttattttagatgaagaaggatacacaaaagatttacaaattaaaaaatcaggaatttctgaagctttaattgaagattttatggtaagagcaaacgaaaatgtttctgaatttttagcaaagagaaaatttcccgttatttatcgtattcatgacaaacctgatattgaaagaattgaagaattcaatggagtattaaaatcattaggagttaatgttgtaattccttatcaattagattcaaaatcttttgctgatgcagttgaaaaaatcaaagaacaaagacttgataattttattaaaataatgattttaagaacaatgcaaaaagcagtgtattcgccagttaaccatggacattttggtttggcttcaaagttttatagccactttacaagtccaattcgtagatatccagatcttcttttacatagaataattagacattttttgtttgagcataaaaaagatttgcttcattttgaaaggattttagaatttcaatctaaaagtacttcagaacttgaacaacgtgctcaaacattagaaagaaaagtagtttctattaaaaaaacagaatatttttcttcaagaataggccaaaaatatcgcggtcaaattacttcaattaaaaagtttggtttttttgttgaattagaaaataatgttgatgtattagttcatattagtgatttacaaacaaatgaacaagaagaatttatactttctgatgatagttttactttggcaaataaattttataaatatcaattaggtcaatttgtagaaattgaaattttaagtattgatattccttttggtaaaatttctgccaaagtagtattaaaaaactaattcaaaaggaagtaacaatgctcaaggtattttataaattcagtttaactctcatgtttaaaagttcaagaggcatattaatgctttttgttcctttttttataattttattttttgaattactttttatttactgagctgctcaaaatacttcagaaattaagattaataataatcatatctttagtgttaaagatcagttagaagtatacattccaagaattttagaaggaccttgaatattaatacccaatttctttttaatgcatttattgatgtgatcgataatgcaatttaaaaaaaattcatacctttataaagaatttattttttattacaaagattattactattttttaatttgattattttttctagtaattaactttgtttatacttttttatttttttctttattgttagtatctttacttggagattcaaatattccaatcaattttgctcaattatttttttcttcattaataatcgctttattttttagccctttacctttgatttactttgttattaaatccaaaaaatattctagatttttaaccattttttatttgataatttttgtaattttttatgtatcacttacagctagattgtctatatattatgttatttataaaaacaaaataagtgatttaggtgatgtaaaaagaacttatttaagatcaataaattattactctcctcttcatttactactaagatctgtaggattgttgtttaaaaatccctataaatcctctaatttttatttttattctaaacaatgatttaactatgttgatttaatttcttttacaattattttaacaacattaaacattagcattttagctactacgatgattaaaggagcaaaatgagtcaaattcaattaagagctagcaatatttctaaaaaatttaaaaataaaattattttttcaaatattaatcttgaaatttttgaaggagattcaattgctcttttaggaagaaacggaagaggaaaaactttgttattcaacattttagcaggtgctgacgaaccagatactggaaaggttgaactctttaatactgataaaaaacatccttgaaataatatgggttatttagaacaacaaggtaaaagaatcaataacattaaggtaaaagatttcctttccattatagaaatgacgcttcgaaatagtgaagaaaaagaacactacaagtttttaaacaaacttttatcattggatcaaactttggatacaaaaattgctaatctatcaggtggtgaaaaacaaaagttagctattttgcaattatttttaaaaaaacccaaaatcatttttttagatgagctatataacaatttagattacataagtagagaatctttgataaactatattctagattataaacaaaaacacaatgcaactttattgtttgtgtctcatcacaaagaagaaattttaagattagcgaatagaatttgacttttagaaaatcaacaaataaaagtagatactagagatttaaacaaattttttcaagaagatattaaagaaaatattttttacataagaaaagaaagtgaaaattaatatgacttttgcaaaattaaaacaactttctaagtttaaaaagtgaattattatagcaattactttaacaatttttggattatctagtcttagttttttagcatttgctaaaactaatgtgttacaaacttcttcaaatattgaagtaaataaagaaattaaattttcaatcacaaaaacagtttcagatttaaaagattttttatccagaacagatgaatcggatacagataaaacaagcgaaaatgaagatagtaaaaaaataaatttagcagatattcctgatttaattgacaaacaaatttattttgcacttacaaacgataaacaaggtcttgaagataaagaaaaagttgaagagtataaaagaaaaaatcctaaagttttttctattttgggagattttttatacataatcaaagatccacaaagtcttgatgaatttgtacaatgaaattctttagttgataaaaattatcaacaaatgttatcttcttataaacaaaatccagattttttcattgagaataatttaattgtttatcgtggttttcttcttccttcaacttcttcttttgcaacacaagtagatgttaatatttttaaaattgattatgatcagaaattaaataaattagatttttacttacttgctccatttgattttggtcaagcaagtgcttattccaatgcaaagtcaatatcccaaaaagtattcatttttcaagtaaaaaagaataatttattgaataataaaacaaaagttagtgagaaaatttttcaacaatagtgcaaattttctatttttcaactatatcttaaaaatgtattataatcaaaatgatttataatttttttaacatctttgcaaatagatgttaataagaagaaaggacaaaatgaaaaaattcgcaagaacagtactaggagatattgatcctagtcaattaggcattgtagactgtcatgaccacttaataaaaaattatggacctgaagctcacgagcatccagattttattatgatgtcaaaagatgctgcaattaaagaaatgaatgaatatgtagcaaaaggaggaaaaactgttgttacaatggatcctcctaacgttgggcgtgatgtttatcaaatgttagatattgcaaagaaattagaaggaaaagctaacattattatggcaactggttttcataaagctgcattttatgacaaaggtgcttcttgacttgctttggctccaacagataaaattgtaaaaatggttgtagctgaaatcgaagaaggaatggatgaatataactacagcggaccagttgtaaaaagatctaaatccaaagccggaattattaaagccggaacaggatacgctgctattgatcgtttagaatttaaatctctagaagtagctgcaagatcttctattttaacaggagcacctgttttagtacatactcaattaggaactatggcttacgaagctgctcaatatttaattgattttggagttaatccaagaaaaattcaactttcacacttaaacaaaaatcctgataaattctattatgaaaaaatcattaaagaattaggtgttagtttatgttttgatggaccagatagagtaaaatattacacagatgcaactttagctgaaaacatcaaatatttagtggataaaggttatcaaaagcacattaccttgtctttagatgcaggtagaattttatatcaaagacactatggattagaaaagggtaaatttacttttggacttggttatttatttgatcgttttattcctttattaaaacaagttggagtttcacaagaagcaattgatgatatgttaattagcaatccacgtgaaattttaacttttgatgaaaaaagagaatttaacaaagattctttaccacaaagagtgttagatattaaaaagacattcaaaatttaatcataaaacgtagtaaggagacttattttacaaaaatgaaaaaaatcaacttatctagcaagaaaaaattttggtttggttgattggcttttttagttgcaaatttattaattattttaataactttgcttgttaaagcagcaaatccagaaccaaatgttgaagcttgatcttcacaagcttgatcttctgctggattgtttttaattaaaacagtttatgtttcaaactttttagctgttacgcctttacttttagctaccatagtttttgttggctatatgattatcggaaggggagtaaaagattcctttttaggagctcttaaaacagcgattggatttttgcttttaggtataggatctggcgctttggtttcattagctagaccagtttttgaagctattagaaaattaggttcttcagctgaaattattccgctcgatccttacttttctttatcacaatcacaagaatttttagctcatatttcacaaaatattaaaagtggaattgactattcttctttatttacctttactttattaattgcttttatagtaaatattatttttgtagctacaaaaagatgaacaaataccaatgcattaatgattactggacacattatgcttcaacaatcagctgtagttacttcagttttctatgttttactatttagacaaattcctattgttgatggagaattaaatgctggatcacaagctggtttagttcttatgtcaggtctatttttaggaatttattgagcaagtgcaacaacagcaacactaaaaccaacaaatttagtgacccaaaatgctggttttgctgtaggacaccaacaaatgcttggaattttaacttcatataaattaggtagattctttggtaaaaaagaagatacagcagaaaatagaaaattaccttcatatttgaagattttcgaagataatgtctttacacaaacattaattgtctttgttttattcgtaattctatttattattattattcaaggatcaaaaacttctgttttaaatccaaactgaattggatttacacaacaatcaggactttcttcttgaaatgctaatttatattcaggagctaactttatttttaacattataggtggagcgcttagaattgttgcgtctttacttgtaattattactggtgttagaatgttcattacagaattacaacaatctttccacggaattagtgaaaaaattattccaggagctgttgttgctgtggatgtagctgctacatatggattttctattaattcagtaacttatggttttgtttctggggttattggacaatttatagcagttggtattatgataggaatttcagcaattccaggaaatacttactcaaatatcgcaattccattatttattactttatttttcaactcagggtctttaggaatttacgcaaatgcctctggtggatgaaaagctgctgccatagttccaggattaattggatttttagaaataattgtagtgtcctttgcaactaaattcttatcaaatgttgcaatagcagatggaataaataatccagtagctcaaggatacattggaatgagcgattgaaacttattctttggattattaattatgattagcgcttactcagtgcctgttgcttgaatatttgtttttgttgcaatggttgcactagtggtattagcacaaattgttgattcaggaaatcaaagtaaaaaaacatttttacaaaaattgtttaaaattaaagtagataatttagaagaagcaatagctcaaactagttaattttttataaaaattgcttcttaatttatcttaaaattaaaaatcactataaaaaagaaggataaataatggcaaacttaaaagttatagcagcttgcggtaatggaatgggaacttcaatgattattaaattaaaagttcaaaaaattttaaaagaattaaatattccagcagatgtggatgctttatcaatgggtcaatctaaaggaatgacaaattcagttgatattattatttcttccaaacatttaacatcagaatttgtacaaaaccaaaaagcaaaaattattggtgttacaaatttaatggatgaaaacgaaattagacaagctttaaaacaagcgttaaatctataagtggacaattatggacttattaaaaacattaaaaaaattcaattcaattcaattaaatttagaagctaaaaattgacaagaagcgatttggctttctgttcaacctttaattgaaaaaaatgcaattacacaagattactacaacgcaattattgaatctactattaaaaatggaccttattacataattgcaaatgatcttgctatgcctcatgcacaaagtgaaagaggagtaaaagaaaatgcattttctttaataacacttaaaaaacctgtattttttgacaatgatgaccgtccagttagaattttaattgctttagctgctacttcacctgaaattcacacatcagttgcactacctcaaattgttgcaacatttgaagatgaatcagtagttaaacaaattttacaagcaaaagaagctcaacaagtgattgatattattttaaacatagattttaaaaaatacttatcttaaaattaaataaaacaagttggctttggctgatttgttttatttttattttatttttgaaaggaattatgccattaccattattacaaatcgctttagataatttaactatcgaagacgcaattaactcagctaagaaagcacaaaaatacattgacattattgaagtaggaacaattttattagcctcagaaggaaaaaaagcaattgttgagctaaaaaaagcttttccagataaaatcatcattgctgatggtaaaattgcagatgctggtaaagtattttctaagatgttttttgaatctggagctgattttgtcactgcaatttgtgcagctgaagtaccaactatgaatgatattttaaattatgcaaaagatttaaacaatgcaaataactttaatattcaaaaagatttacaaattgaaatgacctataactttacttgagaacaagtagaaaaatgaagacaagcaggagtaaaacaattagtttgacaccgttcaagagatcttcaagcaagtggtaaatcttgatcagatcaagatatagaaatagttaaaaaactagcttctatgggttttaaaatgacagtaacaggtggagtggaagttaaagatattcatttatttaaagatattccaatttatatttttattgcaggaagatccattagagatgcagaaaatccagaattagcagctaaggaatttaaagatgaatttaaaaaatattgacaataaacactttgttggaatttacgaaaaagcaattgataaacattacagttttgaacaaaaaattgaaattgcaaaagcagctggttttgatttcattgaactaagtgtggatgaatcagaagaatttgctgctcgtttaaattgatccaataaacaaatcaaccttataaaaagaaaactagataaagaaaaattttatataaattcaatgtgtttgagtttgcacagaaaatacccttttggttctgcatcagctcaaacaagacaaaaagctttagcgataatggaaaaagctctaattttagctaaaaaattaggtataagaattattcaactagcaacttatgatgtttattataatccttgacacgaaaaagctgaagaatattttattcaaagtcttaaaaaagcagctaaattagctcaaaaatactcaattacacttgcttttgaaactatggatactccatttgcttcaacaatttcaagatgtttatatttaattaaaaaagtaagtatgcctaatttatttgtgtatcctgatttaggaaatttaaatagattttctaatgatgtggaaaatgaaattaaattaggccaagatcaaattgttgcttttcactttaaagatacattggaaaatacttttaaaaatgtagattttggaaaaggtgatgttgattttgtcagatctttaaaagctattaagtctattgattatcaaggaccatttttaattgaaatgtgatacaaagaaaaagattttgattcatcaaaaactttagaacaaaacaaagaagcacaagttaaaaacattttaaaagcaagagaatttttcttagataaattaagaaaggcatatgatgcttaaaaacaaagaacaaattgcaaaactcaaacaagaagtttatgaagctaatatgcttctttataaatataaattagcaattcacacttgaggaaatgtttcagcaatctctgaagatagaaaatttatggcaataaaaccaagtggaattgcttatgaaacaatgacagctgatgatatggttttagttgatttggacaataatttgcttgaaaataaagcaattaatccttcttcagatacaccaactcatgccttattatacaaacaagattcaagaattaaggccattgtacatacacattctccatatgctgttgtttgagctcaagcaggccaagacattccttgcttaggaacaactcatgctgataatttctacggttctgttccttgtgctagagaattaagtgatgaagaaataaatggtcaatacgaacacaatacaggtttagtgattgtagaacattttcttaaaaacaagcttgattttatagcaaatagtgcttgtttagttaaagaacatggcccttttgtatgatcaggaaaatctgcaactgatgcagtaaatttagctcttactttagaagaaattgctaaaatggctttatttacaaaacaaattaatccaaatgccaaacacgctaatttaacattacaaaataaacattatcaaagaaaacatggaaaaaacgcctattatggacaaaaaagaaaagaaaattagtttccaaaacattgtttttgatcttgatggaacacttttagataaagacaaaaatattttgaattctactttatcaatcttaaaccaactgcaccaacaagctaacaaaaaactcatcattgcaacagggagaccttgatactttacaaagagatatattaatcaagtaaaacctgatttgcctattatttcttgcaatggctctttaatttatgattttaaagcaaaaaaagtgatttttattaatccaatagaatcaaaaatagcaaaatttgtttttgatgttttaaaaaaagaagaaattactttcttaatttattcagatcaacaaatttatgctttttctaaaaataaagaaaaaaaagattgatttatttggttagaaaaaacacaaaaagctttagaaaaagaagaacaatttgacattgattttttcgatacagctaattctgactttgatataaataaattaaaagttgttaaatttttaatgataaaaagtgattctaatttaaaaaacatagaaaatgcagttgagcaatttaagaatttagataaaatttatcttctttcttcgtcaccaaaagttattgatattatgccagttggaagttctaaaggtgatggacttaaaatattagcaaaagattttaatttagaactaaatgcaacaatttcctttggagatgaagcaaatgatgtttctatgtttgaagtttgtaaatattcagttgctatgggtcaagcagatcattatgttagagaaaaagcttcattttctatagaaaatcataattcagatgcaatttttaattttttaaaagataaaatttaaataacaatggataaacaagtagtcagaaaaataaaagttaatcatcttggagatggttattgaattatgccttctaccttctcaatttttactcctaaaatttctaaatatatagtaaaaaaagctaaatctcttgatgaaattattgagtacaacaatcttttaaataaagaagttatttttagtttcaataaagacgaagattttaaaaagtttaattttttacttaaaaaaagagaaattgactttttcttggataaaaaaataattaataacctaacaaaagaaactttaattgattttgaagtggttccaaatcttaaaataagattaaattgaaaatcaattaaaaacatttataacggtactatatttttttatagcaaagactattttagaagtttattaatcaaagaacaaacaagaactaaaaaagaaaatattgttattttatgaacttgattgggctttaaaacagtagaataaactttttaaaaacacaattttaaagatgacaaatatgaacaatccagtttttatcctatattgaacacactgtttatatttattcaatttataactacaaaagcaatcagcattaattgattgcttttattttgaaatttaccaaactaaaaaagcttgaaaattcaagcttttttaattattattagtgattttgttttagcaaattaataatatttcaaagttatcaaggcaaaaaaacattgctgaaaaatttttcttaattttaaaaagtaaatttcatttcagaaaaatttttttttacaaatttttgtaattgttttatttagttgaataatttggataagaaaattttattgtgtaaaatataatgaaattttcaatttacattaataaatgagataaatgaacagaataaaatctaaaaaatttttaggttttttaactgcgctgacaatacctgctgtttctgttattgctgtttcatgtggagctaataattacagctataaatttagtgataatacaataaccgtaaacactgttaatcacagtgttaaatatactgttgatggtggtaaaacagctgtattttctctttctatggaaaatatccagccaaaatttttgatggtactgatatagatttaagcaaagtaaaacttgaatatattaaatttcaaccaattattaaaactgttactaccacagaaaatggaaaaacagttcaaaaacaagaagaagaatacgacaaactagtaggtcctgcatttggaagaaccaaagaagagcaaaaactagctgctccaaacattaaagttttaggctcacctaaagtaagcacagaaaatggtagaactgctacatttgatttacaacttccagttttagatcatcaagtgttatataactacagatttgtttatgaaaaaggtaatgaaccagtagttatcagtggtatagctcttttaaaagttccatctttaaaagattacgagaaaaaatttaaaactgaacaactaatacaggaacaattaaaaaaaccaaaaacacaaattaaaactactgttaaaaacaattatataaattcacaaaaactgcaaaatttaatttagactcttaagaaaggaaactaaatatcaaatataaatgcaaaactaggtttgagcggtttggattgagctattattgtaatttatcttgttgcaattttaggaataggtttactattttgatgattacaaaaaagatcaaaacaaactggttcaacaaaacacttttttacaggtggaggtaaaaacctggtttgagttgtaggaatttcaatttttgcaactataacttcatcattattctttttaaatagtcctggtacagttatgggttcaagatgagcttgaatcgacactaatattgcaattattgcaatgataccagtagttattaaatgagtaattcctttttatataagaatgaaggaatctacagcttattttttttagagaacagatttcattattcactaagagctgttaactcattaagctttattattttccaaatttttagagttgctgttgttttatttgtaccaactgtagctctttcaattattattgatattgattcaatagttatcttttattattggattagtaacagttataattaccacaataggtggatttaaagctgttgtatgatcagattcaattcaaggaattgtattattaggtggaattgttttggtaattattatcggattagcaaaaacaaattgaggttcagatactttaaaataccaccaaattttagatgctagctcatttaaaccaacattaactttcccaggaattattatgctagctatttacaacacaattaactcattatatttatgggttcacaagatgttacgcaaagatataaaggaactaaatcaattcgtcaagttcgttaaactttatgaattatgttttgagtttctatagcaacagctattttattcttctcaactggatcagttctttatacatatttcttatcacaaggatattatgtagataattctaaaaatcttgcaagcggaattaataacgttgtaagtccagcaggtaatggttctggtttcctctcatacttcattgctggttcattgcttattggaattacaggtttaattctttcagctatcttcgcttctacacagtcaacagtttcatcaggattatcagcacttgcaaactccattgttgttgactttattgctaaattcaaaccaaatactccagatagaacattagctttgatttcaaaattattagtatttatttttggaacattaggaatattatttggaaatgtgttaatttcaacaaaacaagatgatttatttaattacttcacaggatttattggtttattaaatgcaccaacaattgctgtattcttgctatgaatttttacaacaaaaacaaattgaaaaggtgcgcttgtcggctttgtctttgcaacattagtaggaatttgcatttgattactaactcaaaaattcataaccccaaatggagctgttttctcatttagtgctgcttgattaacaatgattacttttagtactacattaattcttggatactctgtatcacttttattgccaacaaaacaaaatgatcttacaaatcgtgcatactgaacaagatctaaagaatttattgaattaatgaaattagaagaagaactagatatagcagaaaaaagaaaaaatgaaaaagctattcttgagttacaagtacaagttaaccatttaacaaaagtagttgattctcaaggacaccaaccaaatagtttaggatattaatagaaaatgatttttgatagattagaaaatatttcaagatacaaaggcatttataagaatttagatttagcaattgaatgaattacaaaaactaatttaaatcaactcagtaaagaaaaacatattattaaagaaaatgacgtttttgcacttcatatggaagttgatagttatggtgatcaaagtgcgcaatatgaaacacaccaaatttatgctgatcttcaggttatcttagacccaaaagaaaagttatactttgcccaagaaagtgatttagaaaaacctaaaactcaatacaataaagaatcaaacttcactttatttgaaattgataatcaaaataaaaatttattacatccaagcacaaaagattttctattcttctttcctaaagaaggacatgtgcccaaatatttacgatacaatagaaaactaaacaaaatcgttattaaagttaaaatagattgataatgattaatataaaaaaggtaattaagctaacttaattaccttttttaatacttttgaaactaaaaaagtttagttaaaaatttgtttgttaaaaccaaaactaaagcaaattgatgatattgctatctttttgtatatttagatacaaattttaatttttacttagcttttcattttaaagacaaaatttttagattattcaattaatacaaaatatagtcattgagatttttgggaattaatacttataacttgattttaaataaattgctttatatagatttaaatttgtgtttatttcacatttgagttgtataaagcttttatttgtttgaatttagcttcttaaagcgctttaaaagcttgattaagcatttaaactataaaaacaaataaaacgtaaatacaagtattatcaacgatataagttattaatgcatttaaaatcattaaatactatttaataagctcatattgttacttattaattacttttaaaaataaagtataaataaaactctatgtttaaaatattagttaattctttaaagtaatttttattttttcatataaagataaaaaacagcaaaaatttatttgctgttttttaacaccccccaatgttataactttattaggtgaataattcatatgaatagaaggaataaaattttttagtaaataacacacaaatataacgcctcttagttgttccttctattagatttacttacaaattactgcttgtaagttgaaatacaaaatacacaaatgcgtaatttcatttttgtgtaatttatactccttgagaactatttttagtgtcattaataatattttaatttttattgtcattatggagtaggtcaatatagctaaataaaaactaatatattcaattaatgcataataattatgccactttttttaaaatttttttatttttttacacctagagatggaattcaaacagtaatttttagtttattttaacttattttgcttgattttgaagtaaattaagctttattttatgtataaacatttaattaatctgtttttttgaataatataaatttctaaaattcatccaaagtattttacttaattgtaagagtttgtgagaataatttattgtttattgctgtatttattgctatttagttattgtttttattagatttagatagctgaataaacaaataatgatttaaattttaaattgttttaatattattttatggagtttggtttttatgttttttattagcctcaatatgttctttaattttgctcataggatcttgtgttaatgcagaattaaattcttttttgtctttttttgcttgttgatttaacatctcttcatattgagttttaattgaatttttaaaatcttttaattcttctggtaactttgcatcatctaggtaaacagctgctttttgagtacttgcttttgtgttaacataatcatttaaaaattcttcaagtaatttattaatttgttgtgttttttcttctttagtaattttgttattatcttcaattgcttttaattctaagctaagtccactttgagaaaataaagttaaaatttcatttttagtttccttttttacagcttcttgtgtagaaaatttaaatttatcatcattttgttttgaatttaaaagttccattaaggatggttcaaattgagatgataaatttttatattctgttttaactatttctttttatactacactaacagtagattttggaagcgttaaaactgtagcaatagccactggagtcaataaaatgcaacctattgctactgcaaatcaaggttttgccttgtttttcttgtgtttttccataatatctccttcgaaatttagtaattacacacaaattatatatatatatatatatccaaagaatttgtttggttttgttaatatttaacccatttttgcttcttaatgaacaaaattcacaatttaataagaataaaagtaattagaaatttgttataaaaataatggaaactacaataatattcaattctaatttataaatgagcaaatccccttttcctagaaaaatagaaaaggggattttttatgaaatattcattagaatttaaattagaatgtgtaaaaaaatacaaaaaaaaaattgaaattaaaaaacctgattttgctaaaacaagtcagaaaaattttttaaatcaagtaaatttttgagaaaaaatttatgacaaattaggagttgaaggtcttaagaaagaaccacgaaataaaaagtgaactatagatcaaagattaaacatagttaaaagatttttagctaatgaaccaattgttaaaatttcacttgaaaataatcttaatccaagtcaaatatctttttgaacgaaaaaatatttagaatcgggaattagtggtttagaattaaacaaaggaagaccaataatgaaatctaagattagtaataataaatctacaaaagtatcaaacaattccgatagtcaagatcaatcaaattcttcattatctgtatatgaagaacttaaacttttaaaaaaagaaaatgaagtactaaaaaagtgaaaagccttggtagagatctttgactcaaatcaaccaaggcaagaaaaaataaaaaaatttataataaagtaaaagctgataaaagccttcgcttaactcaagtattaaaagagctttctattcctatatctactttttattatgaattcaaaaaagaagattttgacaagaaaaatgaagaaattataagccaaatgaagcttatttttgtagaaaataatgctagatatggaaaaaggagaatcaaagctgaacttaataatagaggctataaaattggacttaaaaaagttcacagattaatggaaaaattcaattttaaagcaatttgtccaagaagaaaatacaaatcttacaaaggaacagttggcaaaatcgcagacaatattttaaatagaaattttgttgctactcaatcaaatcaaaaatgaactacagatgtaactgaatttagcgatccatttggaagagcatatttatcaccaattttagatatgtttaatggcgaagttattgcttgagatttgtctgcaagcgctaacaaccagcaaattagaaaaatgcttcaaagagcattttcaaaacacaaaaatcttgaaggtttaatttttcacagtgatcaaggttgacagtatcaacatagacaattttcagaaaaattaaaagaaaaaggaataattcagtccatgtctcgaaaaggaaattgtttagataatagcgttattgaatcgttttttgggacattaaaaagagaatgtttttatggtcgcgaaaaagaatttttaacttttaaacaatttcacaaagcaattgcaaattatatttattattacaattacaaacgaattaaagataaaataaaatgaatgtctcccattaaatttagggaaacattcatttcaaattataattaattaaaacactcaaaaattttttcaagaaaaggatatcacctcataatggtaattgaaaataatttgctgaagtctttaaaatttgaatgtataaaagattctggaactattactacagaaatattacttatttgaactattttcaaacgttatcaaatgtgtatgaatgttcaaagaatttatcaagcttctaattctttctagttgctaaatttttagctacgtatagaggttttgtaattgtaataaagtttttatttttggaatatttataagtgaatcattgatttctaaagcaagatttggaacaatatttagagctttgttttctttgtttaaaaagataatgcattgaaaaaatctccatttttagtaaaaggttcataaataattttcttattttagaatcaataataaattaaagaatataatctaaaagtcaaaaatgtttgtaaaaaattgatccatttctgtttttaaatgcttgttttttcaagtgttttcaagattattttctattttatttattcttaattctttgtattattgtttgagtagttttgaaatgatattttgcattttttcttaaaaaatcaagtgagtgttttttgatttcagctaaagaataatttacgatattttcaatgcctgatgatccttttggaaaaatagtttttcattttttttctcttttttgcattgtcattgttaaactatactttgcaattattgaagcagcagaagcttgttttaatttttcatccgcttttttgattaatgttaaaggatatttttttaaatttcaatgtttgatgttcaatttttgataaatttgcaataaataagattcaaaagtttccaaggaaacaaaaccatcaataataattgcttgtggaggagttgttgaaaaatgttctttttttagttgttttagtatttttaagtacaaaatagttttaattacatgcgaattaaaaccttgctcaattaaatagttatacttttccatttctaaaacaatgacttgaaatttaattttttcaatgagctgattatataaattttctaattttaaagcagttaaagctttagaatccttggtttgttcaagcaattgagattctaaatcactttctttaaaaagtgcacaacaaacagttaaattagtaaaatattctcccaccccaacttcatcacaaccaactacataactatttggttttattgaatttaaaatatccattgttatcctttgttattaatttatcagaaattataaaatactttaaatctcaaatatatgctctattagaaattaaaattaaattatttcagatgttgttaaagtctacactaaaatttatgaattgattttggattaactttttttctgctaaaaatctcattttttcttctttttctgcatattttcccagtggtttttcaaaaggaacataaaatattttgtttcaatcaatttgagtttctttattttttacataagacacactaactaattgttgaatgaaattttcttgattttcaaaattagaaattctttgatttttttcatccaatagaagaacgggttgctttgcattgatttttaagttatttagatcgcggttcgaaaaaattacactatcttctaaattattttcaaaattagctcaagttgggattgtatttttgtaatacataaagaatttgtttttatttagtcttaaaaacttttttattaatttttcttcatcttcatttagatatttatgtttaataatgcttgtttttgaagcaaaattatctttattttgcaaaaataatttaatttgttcaattaagtttttatctatttttctttttcttaaaaaagttaaaaacttatttaaatcaaaaacagatttagaaattaaactaaaaaaaataattgcaaaatcaagatttgtaaactttttcatatttaataattttaaagctttttagaaaaattttgctagcaataaattaaagcatttttttatataaatctttaattaatatataattaggaaattaatattaatagaataatgatttttatttaataaattaatgtaatttgtaagaaataatatagaaaaaacaataaatttttgttaatttttaaaggatataaataatgagtattaactacaatgaggatacaaaggataaaaattcgaaaattattcctactaagttttttggtcttggaggaatgcaagaaatcggaaaatcgactttagtaattgaacacgcttcagatattgtaataatagattcaggggttaaatttgcagatatttttaccacaggagttaaaggaatgattcctgattattcttatttgcaaaagaatcaaaacaaaattaaaggtttatttataactcatggacacgaagatcatattggtggaattgtttatttaattcaacaagtgcatattaaaactatttttgcaccaagaatagcgattcagtatttaagagcaagaatggatgaatttggtttgaaaattaagatcaaatttattgaaattgaaaaagatgcagtacatacttttgatcatttaagtgtagatttttgaactgcgcaacattctattcctgatgcttttggaattagagttagttcaaaaaacggttcacttatgttaacaggagattttaggtttgattacacaccaattggaaattacactgatttttcaaaattaaaacaaattggtaatgaaaatttaactgctctgttttcagattcaacaaacgctatgagaccaagtcattccccaagtgaaaaagacattttaaaagacattgagtatcatattaaaaatgcaactaaaaaagtaattattactgcttttgcttctaatttaacaagaattaaagcaattattgatctaggaataaagctagataaaaaaattgttacttttggaagaagtatgattaatggggtaaaaataggtagaaaaattggttatattaactcaccagataacatttttattgataagaaaaacataagtaaatatgatccaaatgaaattttaattttaacaacaggttctcaaggagaacaattagctgctttagacaaaatgtcatataacaaacatcctcacgttaaaattggcaataaagacgtgattattttttcttcatctcccattcctggcaatagaatcaaaattgaattattaattaatagattatataaattaaatgcaattattaaagaaaatggatcagatggttatctgcatacttcaggtcatgcttataaagaagaacatgaaaaaatctttgagttgacaaaacctaaatattttttcccttatcatggcgaatatcgaatgtgtttagcgcacaaacaaacagctatagaatcaggaattaaagcaacaaatgtaattattcctgatttgggtgaagtttatgaaatggttaatcaaaaaattaccaaatcaaaagaagtaattccaacaggacctgtttacattgatggttatgttgtttccacagcaaattcacagattttaaaagaaagagaagaactaagagaaaatggttttgtttttatactaactgcaatagataaaaaaaccaattcaattattggaagatcaaaagtaatttctcgtggtgctttttttgccaaaagttcaaaaaatcttttaaatgaaataagaagattagtgcacggagcaattttatttacaattaaaaatgaatccaaatgagatattccacagctaaaacaactaattaaaaatagattaactaccttcttttataaagaaaaaagaagaaaaccagtgattctatcttcgtttttatttgtagatgaaaaatatgattttctacaagattatgcaaaaacattgtcttttgaaataaatgataaaagttaggatttctgatgaaaaaagacactcacaattttatttatgtacaaggtgcaaaagaaaataatttaaaaaatattgatgtagtaattcctaaaaataaattagtagttttaacaggtgtttctggctcaggaaagtcatctttagcttttaataccatttatgaagaaggaaaaagaaggtatgttgattcacttagctcatatgcaaggcagtttttaggtggtactaaaaaacctaatgttgattccatatatggattaatgccaaccatttctattgaacaaaaaacaactcacaataatccaagatcaacagttagtactgtgactgaaatttatgattattttcgtttgctatatgccaaaataggaagagctttttgtccaaaacataagcaagaaattaaagcttgaaaaaacctagaaattattgattatgtattgtcttttaaagaaaatacaaaaattttaattcttgctcctaaagtgaaaaaacacaaaggagatttaacaacaattttaaaccaaataagaaatcaaggtttttccagaataaagataaatgaagaaattgtttctgttgatgaagaaattacttttaataaaaacacttattatgatattgatattgtagtcaacagattagtaatttcttcttctattacaaggcaaataattagtgattcaatacaaacagcttttgaatatagtaaaggtttggttaaaattgaagctttaggttatcaaacaaaaactttctcacaagtttatgagtgtgatgagggtgattttaaaattaataatatagaaaacaaacttttttcctttaattcgccttcaggaatgtgtcaatcttgtcaaggaataggaataaaattaaaagctgattttaacttagttgttttaaataaaaaattaagtattaaccaaggtgcattaacttattttggtgcttcacctgatcctaaatctattgaatggcaagaatttgatactcttttatcttattacgaaattgacaaagacgtacctattgaaaaactaagtgctgatgaattaaatattattaaatacggaacagatgaaattttagacttcacacttatttcatcatcaggaaatagatatagaaaaacaaagtcaattgatggaattttaattaaaatcgaaaatagatatttagaaacaagtagcgaagaaataaggacttgatataaaaaatttatgtcagaattagtttgtgctgaatgtaaaggagcaagattaaatccacaagctttagctataaaaattaatgctttaaatatttatgaactctgtgaattaccaattgataaaatttatgagtttattaaaaatctaaaacttactgattttgaatttgaagtagctaaaaatattttagttgaagttgaacatcgacttaaatttttaattgatgttggacttggctatttgtctttaaatagaaaggcagaaacactctcaggcggtgaatcacaaagaataaaattagctacacaaattggctctaatttaactggaattttgtatgttttagacgaaccatcaatcggacttcatcaaaaagacaatcaaaaattaattaattctttaaaaaagatggttgaaattggtaatactttattagtagttgaacacgatgaagaaacaattttatcagctgaacatattattgatattggaccttttgcaggaacgaatggtggtcagcttttatccagtgggccactagacaaagtgcttaaaaataaagattctattacttctcagtatcttttaggcattaaaaaaattgaaattccttcaaaaagaagaatgggtaatgggcaatttatagtaattgaaggtgctaaagaaaacaatttaaaaaacttaaaagtagaaataccattgggtaaatttgtagctgtaactggagtttctggttcaggaaaatctactttagtaaatgaaattttagttaatggaattgtaaaacatctaacaaatccttcacaaaaggtaggaaaacattcgcaaataaaaggaatgtttaatcttgataaaatagtttccatttcacaatcaccaattggaagaacgcctcgttctaatccagcaacttatacttcggtttttaacgatattcgagatatttttgcttcagttgagttagctcgagctagaggttatcaaaaaggtcatttttcttttaatttagcaattggacgttgtgataaatgtcaaggtgatggttcaattaaaattgaaatgcattttttaccagatgtttacgttgtttgcgatcattgtgaaggtaaaagatataaagaagaaattttagaagtaaaatatagtggcaaatctattgcagatgttttagaaatgactgttgaagaagctataattttctttgcaaaacgttcaaaaataaaagaaaaattacaaactttattacatgttggacttaactatatcaaacttggtcaatcagcaactactttatcgggtggtgaagcacaaagggttaaattagctacttatttacttaaaaaaccaacaggaaaaacattatatgttttagacgaaccaactactggattgcatacttacgatgttgataatttattaaaagttttaaacagaatagttgatcatggagacagtgttttagtcattgagcataatttagatgttattaaaatagcagattacattattgatcttggacctgaaggtggtgaaaatggaggttacataatagcaacaggaacacctgaagctgtagctaaaaatccaaattcatatacaggcgagtatttaaaatatatcttaaataaaaataaaagttttaaaaaagaagaaaaagtataaaatattattctaaagaaaggaaagagatggatgcacaatacactattccagaaaacctaattagtgaaaggccttttaaagaaggagaagcattttatctaataggtaattgattgcctgtttattcttttactattgttttaggtatgattgcttcaattttgacaatatttttcttctgaaaaagagaaaaatataaaattgaccaccttttaactttaataattattactattccttcttcaattattggtgctcgtttagggtttatttttgagcgtttagctgctcatgatagtacaattgcgcaaaactgatgaaacatccgtgaaggaggtttatcaattcagtgggctgtgattttaccaacaatttttaaccttctttatgcctacagaaaacgaatagacatagattatagaaaagcattttcatttattttacccgctgttttaatcggacaagctattggtcgttgaggaaatttcactaaccacgaagtttatggaaaagttgattatacaggacagtatgtcgattgacttggatactgaataagaagaaatatgtttatttctgatagcgtagaaccaaatggtgccttgagagtacctttatttttctatgagttcttaacttctttatttggttatattttaattgtttgagtgttgaatttatttggttgattaaagccaggatctacaggtgctttatacattatgtactatggaattgtaagaacttcaatggaaaacttaagacaagaagcgtttgcaatttactttgttttagctattttatctattattttaggtcttattttacttctcagatttgagttgtttacaaattactacattaaaattggcaaagaagtaaataaagaacacaaaaaaatcttttctctaggacaatatattcacatagtaaaatttttaagatatcaaaaatctaaagaaaaattcttcaatattccttttataagatgaaatagagtagctactattaatagattaaatgctcaaagcaaacaagaacttaattaacacttatactatttgtttttataacttttgttgttatttaaaatgaattttattaatagttgtaaaattattacatataaaaaggagaagatatggaagttaaaaaatatgatgtattaattattggagccggtcctgcagggatgacaacagctttgtatgcaagtagaggaaatttaaaagtagctttacttgaaaaaggtgctcctggtggtaaattagtttcacaatctaaaattgaaaactgaccaggtgatgaaatgattcaaggagctgatctagctttgagaatgtataatcatgttttaaaatttggcgttgaacataattattgtgaagtaaaagaagtgatttcaaattctgagttttcaaaagctatagtttgtgaagatggaactagatatgaagcaaaagctgttgttgttgcatcaggtatggttgaaagaaaacctttagatattaaaaatcttcaaaattttgaacatagaggagtttcttattgtgttgtctgtgatggtccattttatggtcataatccagcaattgttatcggtggaggtaactcagcagttgaagaatcagcgtttttagcttcaattgcttcaaaagttagtgtttttgtacgtgatgcacaatttaatgctgaaccaataatgattgaagagttaaaagctaaagaaaatgtagaaattttcttcaattctaaagttttagaactcaaaggaaaagaatttttagaagaagctgttgttgatattaatggtactgttaaaactattaaggcacattctttattcccttatattggttttcttcctgcaactagttttttaacaaatttagatattttaaatgaagcaaaattaattcctgtagataaatttggtgaaacaagagaaaaaggaatttatgcagtaggagatgttgttcaaaaagaaattcgtcaaatagcaacagctgcagctgatggagcaatagttggtaaaattctaacaaatagacttaaataattttatgaaatccttcatttttaaagcaaaaataaaaatatatttttgctttttagttttttataatttttaattaaattctaaatcttaggcaaaatcgctataagagtttataatttaatattacttatttatttgaagtaaaaattcgaattaaaaggattaatatgaaaaaaaataagaaaaaaacattactacttgctttattcgtttcattaggagccattagctccttttctttaattgttggattatcctctttagcaaaatacaatgctaaaaatcctattgaagaagtacaaaaacaagcacgtagaatcacaggaattacttttaatcccaataaatttactttactttctaattatgaagttattagagatcaactttttgataaaaaaaatggaaaataccaattaaaaaataatgttaatttggaaaaatatcttaatttttatcaagttcaaaaccaagaaagcgttctaattcgttcatttcctaaagaagtagaactaaagtttgaccaagttcaaccacttgatgatgttcaagaatttaaaatagtttttcatttttcacaaaatattcaaaacaaaacctttaattctgaaattaaaaccattaatttagctgttaaagataataaaaattttttaataaattcttttgtttctgaagttgtgaaatcttttgctccaggtgaaaaatcagatcttcatgataacaaaccagaaaatatttttgacataaatggagccagattatcttctgttgaaaacaaaaaagctccttcacttacattgattgaggattttgatttagaaattaaaaaagttaaaaactctgatgatttgaaaaaacttttaaatcaatattttaacttagatcaagttttacaatctttagacaaaactatcgttgacaaaactttaaaaattcatccttttaaattagagtttgttaaagatacagaaaatcaagaaagatatatcacacaaaatcctgatcaaaaaggaatttacaatatttatcttaaaatatcttttagtgatgagttaaaaaatttattagctaatgatgtagataaaaacttttctaaaattcttgttttaactttagccaaagatacttttgcaacaaaatcctttttcattgatgcaagtaaattatttgactttgtttctctttctgatgttgattacaaaataaatgaaaaagataaaactaaaacaatttcacaatatgatattttaagttttcaaaatttcttattatctccagagtcttcaaaatccaacattagtgattgaatgtttaaacaaagattttataacccaacaagtaacacatctttttcagaagcattaggaagtaaaatcaacaactatttaaactccaagttagagctcaaatttgctaatttctttgacaaaaattacaaaaatagttttaaatttactttattaaataacattgttgccaagcaaaatgctaaaggagtttatttagatattccttacaccattagtttaagttctaaatttagaaatactcaagaagtaacaacattatattcacaaacatatcatctggaacttagaggattcaaagatggataccacttaattgattcatataataaatacattcaagataaaaacttcaaattaacaaattcagatgttccaattcttccaaatcttgatattttatctacattgttttcttcgattaatgatttaaataattcaaattttgttattgaaccttcagaaactaataaaatcaacaaagagatgactccgcttgaagaagtttcgggtgagtacattcagcagttaattaacttaaataaaactgataaattaattgagtttttaaaagatagacgttattttaatttaagtttttctgaattagattactttaaaagtatagaatcagactatgttctaccttcattagatgaagtacgaaagagcaatattgaaattgatttatcacaaaataatttatctaattttaaccttattggatctttaagtatttttaaaaataaagctgaagttggaactttttttgctcttttactaaaggaaacccctgatacagttaaatcttatttagaagttatttatgacaaatttgcttcatttttaaagcaaaaacaagcaaataattcacaagataattttaaaatcaatagttttaatttaacaaattctgctgtagatgatcaaagttataattccaatttaacagttaaagctattacaaaattcgattctagcaaaaatattccagagtatcaaagtagtattttttaccaatatctaactaaaatagatcagaattttaaaaatttaacaactaaaaatttagataattcttattttccaaatatttctaaatctaaattttctatttcaaataatcaagttatttcaaatggtattacttatagaaaaaataatgctgaaactaaaaaagtccttgtgaagaatacttctaattcagaagaaaagatctttgcattcaaagataattttatgaattcattagaagaatttttattaagtttttattttagtgctggattaaaaaataattacaaaggttttgaatccattgctaagggttgaactacaaaggtaaattttgaaatagttcctaacaatgaaactaattttgctgatgctaatcatataaatttagcttattgatacaatttttatttaccaattaatgatcaagatttaggtgaggcaatttttagaacacctaaaattgcaatgtcactaaaaataagtaatcaaagtgtatttgattttaaagaaaaagcaagactggatgaaattgttactaatttaccaactgcatcattgactacaactttaacaaaaatttatgtaaaaacagtcgataatagttctccttttcactttgaaagagaagttgaagctgataaacaatatgatgataatgatgtaaaatcaaaatttgccgacaaagatttagattctactcaaacagaacaaacttttgaattactttttggtcatccagagttagttagattaaaagcatatttacaaaatgctaagtttatttacaaagcaaattctaatcatcttagccgttttaatccacaaacgagaattattactttttatgcagtttcagatgataataaaattcaatctaaaccattttcaatagtagtaacttcaattcctaaaccacaaccccaaaatactacaaataattcaaatccaaagtcaacacaaacttcttcttcacagccacaaaatgtaaaaaacaataaagaaaaatcataagagaaagaaaaaataaaaattaactttaagtaggtaatattatgaaaaacaagtctaaagtaattctgtgaagttttttgggtggattattctttttatttacagctactgcttcgattttggttgcaactaattcaaaaagaaaaagttttcaagctttattaaaccaaagaaataatttgccaacaacactttcagaaaacatcaacaaaaatcaattatcttatgctgattttcaaaagataatttctggatttaagctaaaacctgaatttactaatttaaaagcacaaacagtttacactttgatgaaagaaccaggttattcttttaatgttttagatataattgatacaggtaacaaacttaatttagcttttgaaatcaagcttaataattcaactgatgagaacacaagaactcaagttgaaaacaatacaataaaaaatttaatcgttttagcttataaagatacttctccatttgtttcaaatcaaaattctaattcatctacacattctccagattttatttatcaaacaaactttaatttaactggttttaaagatgtttctagctcaaaaactaatcaggatgcttcaaaattaagtccattagatgcaaatattaactcagaattcaaagatgaaaacactaaaaaagaaaataaaattttagattttgacatttcttttattaattcttattttagagttgaaaaaaattatagtaaattactgccctctgattttttaaacaaactagagcaaacttataaaacagaaaaagataataatgacacttcttcttttggtttaattactaaattaggaaaatttaaactttcaaattcactattagatccaattgttttaaaaccaaatcaaaaacttttcttttcttcaacaagtcttcaaagaaaaagttatttagcaaatgatgaaaatggaactttgttattggaatttaatttagagcaagataaaagaatcattaatactatttttttagaagtaaaaggattaaattcaataaaaaatttagcaaaagacattcagcagcaattaactacttttccttctttgttttataacaaattcaatatcaacaaagtaacagatagcaaaatcaaagaaattttaaaaaacaaattagaagctaagcagcaaagtggtagttctcaagaatttaaatacgatagaaagtacatagcaccatctgaaatcatcaaaacacaacaagatcttaataattttcttcaatgaaactatgctgagatcaaaaaactttcttcagtttatgatattcaatttgatgcaattttgaacgatccactaactgattcagataaaaatttattaaattatgaaggaaaagtacacgcacaattaaatgttctttttaaaagaaaatcagataatgtttcttatttagaaaatattaaagatgtttatttcaaactttttgataatcaatttgatagagatttaaaacttgaatacgatgctaaattagcacaatgacataattctagcaatgttttttctataaaaccagagaagaaaaatttattaatttctgatatattaagagacttaaatagtgttattccttcttatattaaaaacaaatcttcaagaaatagaccagataatgattcacaattttattcatattcatttgaggaattattagcactaagtgattatactaaaacaaaaattgttattagttttcttgaacaatactttaatgatcttttattagatgatcatttaaattctgaatctaaaaaaccaggaactataattgctgatcttattaaattagcaagtaataataaacttaatcccctaccttctacattttccaaaacaaatgtagtatttcaactatattatgataaccaaagacaagcattaattataaaatttgttatgtctcctgatacagatggtttagacaatgaagcaagatcaagagaaattattataaaaggatttgctcaaagcgaattaattgatcaaattaaaaatgattactctcctttaatatttttaaatagctcaaaagcagatacttcccatctagtttctactaatgaagttaaaaataaaataagttcattgtcagatataatgtcaaactcagatgctaagttatatgaaataacacaattatcttcagtaaataccgatgttgtgcattactctaacattgactcaaataagaaatcttattatttaaattcaaataatttatcaggaattattctaaaagatactggattaaaaactgatagtattaaaaatgattcagatgaaaatattcaagaaggaacaacaataaaaaatggaacaatttttttaacttttaattttttagaagcaataaatgataatgaaaaacattatattttaagttctttaaaaaatagtaaattaggtgaagttgctttatttattcaaaaattatcaaaagataaagcatcttctttcactaatgaagatagtttcattttaggaatagaatataaaaatgtaccaataaaaagcaccactgcatctacaactaataatgaacaaaaagttaatcaaactattttagctgcaatttcttctgagaaaaaagcagaagttactccagtaaaactagatgataactcaagtaattcaaatacttcagtagataaaaatcatttaaatattagcattttaaacaatagtcaaaatttttcaaaagtcttttttgcaaatccgctaaatactattattttacaaattaatgtcaataacacagctaaggaatcaacactagaatttattcttaaaaccaaagcaaatcaagataatatttacaaatccataattaaaactgataatcaagatgcaacaataaaagttttatttgatagaggaattgattttgcagttattggttccagtgaaagttcaaagaaaacttcaatgttgtttaaatcattattagcttttgataaaatttcaaaagaagattcagagcaaattatgaatttgttatcttcagaatatttaaaataaataaaaaaaccttgattttgaggtgatacccttttcttgaaaaaatttttgagtgttttaattaattataatttgaaatgaatgtttccctaaatttagtgggagacattcatttattttatctttaattcgtttgtaattgtaataataaatataatttgcaattgctttgtgaaattgtttaaaagttaaaaattctttttcgcgaccataaaaacattctctttttaatgtcccaaaaaatgattcaatgatgctattatctaaacaatttccttttcgaaacatggactgagttattcctttttgttttaatttttctgaaaattgtttatgttgatattgtcaaccttaatcactgtgaaaaattaaaccctcaagatttttgtgctttgaaaatgctctttgaagcgtttttctaatttgttggttgttagcgcgtagacaaatctcaagcaataacttcgccattaaacatatctaaaattggcgataaatatgcttttccaaatggtccgctaaattcagttacatctgtagttcatttttgatttggttgagtagcaacaaaatttctatttaaaatattgtctgcaattttgccaactgttcctttgtaagatttgtattttcttctagaacaaattgctttgagattgaatttttccattaatctgcgaacttttttaaatccaattttatagcctctattattaaactcagcttttattcttctttttccatatcttactttattttcttcaaaaataagcttcatttggcttataatttcttcatttgtcttgtcaaaatcttcttttttgagttcataataaaaagtagatataggaatagaaaactcttttaatacttgagttaatcgcaggtttttatcagcttttactctattataaatttttttattttttcttgccttggttgatttgagtcaaagatctctaccaaggcttttcacttttttagaacttcattttccttttttaaaagtttaatttctttttcaaagtttttttctctttttttaaaatgtatgagttcttctttaagaagtttgagttctttatatacacatgttagagaattagattgatctttactatttaaattttttgaaacttttgaacgtttactattaagaattttagatttcgttattggtcttcctttatttaattctaaaccactaattcccgattctaaatattttttcgttaaaaagatatttgacttggattaagattattttcaagtgaaattttaacaattggttcaccagctaaaaatcttttaactatgtttaatctttgatctatagttcactttttatttcgtggttttttcttaagaccttcaactcctaatttgtcataaatttttttgacttgtattagcaaaatcaggctttttaatttcaattccccttttgtatttttttacacattctaatttaaattctaatgaatacttcataaaaaatccccttttctatttttctaggaaaaggggaactgctcattttcaaggtttttttatttattaatttctatttttcttgaataggatgtaatccaactagatctgctttttcaataaatgtaattgaagctccaccaccagttgagatgtggctgaagttatcttgtaaattatttgcttcaacagcagctactgaatctccaccacctataactgtgtatgcgttttctaatttactaatttcttttgctactgcttctgttcctcatttaaaattactaaattctgcaactcctagtgttccatttcataaaacagtgtgagcaccttttaactcatttctaaataatctaagagttcaaggtccaatatctaatccttcagcatcttttaaaatttgtaatggaaatcttgtgttatatagtctttgtgtatctttaaattcgtatgccatcgcattatcaattggtaaaataattttatctcagtatttttctagcaattcattagctaattcgattttatcatcttcaacaattgaaattccaatttcaaatcctaatgcttttttaaaagtatatgacataccacctgctattaagactttatctgctttttctaataatgaagaaattattccaattttatctgaaatttttgctccaccaacaatagcgacaaaaggtctttttggattatcaattaatttggttaatgcttttagttcattttctactaaataaccaatagcagattcttgaatgtgttgtgctattcctacatttgaagcgtgttctctatgtaatgttccaaaggcatcgttaataaatacatcacctaaagaagctcagtattttccaagttctggatcatttttagattctgctttattatttaaatcttcaaatcttgtgttttctactaatagaacttctccagcttgtagactttcaactgcttgttctagttcttcgcctctagtaacaggaacaaaaattatttcttgacctaattcatttgctaattcttcagcaacaattcttaaagatttttttgttaaatccttttcagattttactcttccaaggtgtgaaaataaaatagtttttccaccttcttcaattatttttctaatagtaggtaatgtagatttaattcttttagttgaagtaatttgaccattttgtataggaacattgtagtcaacacgcactaaaacttttttatcttttaaatctaagtcattaatactttttttgtttaaaaaactttgcattgtgtttcaattctcctttaatttttcagttttgtaattatatattagaagaaaagaaaaaatataatttttcttataaaataattaatatttgcttgaatttccttcttttttaattgttttgtactctttttaataaaaagaacaaacaaaagaagaaaaataaagcaaatataaagaaaaataaataatttttttgcttttttctttataaatttcctataaaatatgcttaataacttattgtaagctattatttagttttaaacaaacaggagaacacatgatattaaaattttattgtactattatctgtgctaaagaaacctcacaaaacagtgaacctaagtgtacctatagattaaggtacgcaaaaaaagttcacggtatttatgataattttcatgatattgtagttgctattaactcgttaaatgctccagcaaggttatgggttagagaagataataactttagaagagttcttagattcccattaaatgtaaataaactaactactgaacaaagattagagttttacaatgatgttttttctgataagaaggaattatcaaactctgtagaattagctgaagaacaatttcaagaattaactgaaaaaaacaaagaaagaactttagagctagctaaaattgattctttagaaaaaattcaagaactacaagaagatacagaatcaattatttctactacagaacaagaaccacaagaagagcatgatcaagaatgtgaaatttgtaaatttgctgttcaacaagaagaagctgaaagtgcaaaagattacgatgttgaagaagaagaagaagaagaagaagaagttcttagtgaagaatgtgaaatttgtagattagcttcatcaaaaccagttgaagcaacattagaaggggaagttgttgaagagcaaactgtatcggaagaaccagtcgtattaaaagaagaaactgttgaaaaaatagtaagcaacaaagaatgtttaagctgcaaactacttgatgaagaagttattagtactgatgtgtgccaaggttgtgctaatagcaaaaatgtatgtgatctatgcgagagttgtaatggccaatgcaatgaacaacaaatttatgttaaagaacctgttcaagaagaattatttgaagaacaagcaacttttgagcaaccaatagagctaacagatttagaagatgaccattttgaaacagttcatttagaagaagaagtttgtttagcatgtcaacacgttgcaacttgtgatatttgtaaaaatctagaacacagtgaaattctttatagactcaaaaatggacaagttgttaatttattagaaaccgaattagaaaccgaagaacttcatcatacagattcaccagttcaagaaggaaaagaaccttgtggatgttcattaaaagaaactgaagaaagctgtgattgtgaagcttgcaaatgtcaagaatgtgaagaaaactgtagttgttcagagttaacttgtggatgccaagaagcaacctgtagttgtgcccaagagcattgcggatgtcaagaagagtcttgtgcatgtcctaatacaacttgtgcttgtactgaagaacactgtgaatgcactgaatcaacttgtggttatgaaaacgagccttgtgaatgtgaagaagaaacttgtggatgtgttcaagaatcttgtgattgttcagaagaacactgtgaatgtgttgacgaaacccaagcgtgtttagattgcaatacacaagctgacacaaaagtttgtggatgtacacaagaacaacagccaacttgtgaagaatgcaaggaatgtgatgaatgcaaacaatgtaaagcttgtttagtacaaactcaagaatgtgaagaatgcaaagtaccaacagtacacgatgatgaagaaattcactgtgaactttgtgaattagaaaatacagaagttgaagacttagaaccaagattatttgaagactttgaaaacgaacaagttgaatacattgaaattcaacacatagaagatcaagcatacaattcatgatgtcatgatgaatgatgtagagaaattgttgaaaaagcacaagagccagaacacacattaagttgcgattgtgattttgattacagtacaaatccacttgttgaagaagtacactcagttcaagaactagaagaacaagaagatttacatgttcacaaattagtagaaaatgaaggacaagcagaagtttctattgaaactgaaacaccagatagagttccatttacttcagtaacttatcctgtgggtggacatttagatcattctaaactacaagaaggtggatgcccaacttgtggatttggaaacttattctcagtatctaatgaacagctagcagctgaagttcaaagaagaaatttaccaatggttcttgatcctgaagcagctcaatcatattcaagttttgttgtttcaaaagtggattctgaacaagaatacaaagttagttgatgaacaaacaaaaacttaattctatgattcttagtatgattcttactagcagcagtggtggttatactagttctagtatttgtattttatgctcgtagtaactaaataaaatttcctagcttacaataatatttaaaagatacttttatcaagtatcttttttgttgtttaaataagtaaaagttctagattttaatattaaatttttccttgtttttagcaaatataatttatttcaaatattatttttaaatatagtaatcaaaagttagattcataaaaataaatgatacaaactgctaaagatttattacaaaattgttgtttttggaaatactttttgaagtttcttttattttttgttaaaatatatagaacattcaaaaaaggtacaaaagttatgtcacaaaattacgaaattgctattttaacattgcttatcatcttttttttgttgtttgttgcaaaacaacttttttttcttgttaaaaaacttccatcgaagagcacaaaatttgctgagctttcaagctctacacaaaaacgtttagtacacgaaattacaacagctgttaaatatttatcagccacaaacacaggagctattattactattgaaaataaagtagcaattgataatcttcgaactgatggaattaaaatagatgcaaatatttcttcttcgcttattcttgccattttcaacaaacaatctccacttcacgatggtgcaattgtgataagagataataaaataatttatgcttcaacgttttttaaacttacacaaaaatctgtgctaagtaaatatggttccaggcatagagctgctttgggaatctctgaacaatctgattcaacaacaattattgtttcagaagaaagaggagaaattgggataagtcaaaaaggaaaaattgaaccagtatcttttgaaaatttttctcgtaaattagaggctatccttaaaaatcacaatattgtaaatatttaaaaattaaggagcagttatgacacttttagaactaattcgtaaaaaagacttaaatggagttagacaatattcaaatcaagtcactgctgctcaattagctgaagaagtttcgcatttttctttatatgaaagatcaatgttttttagaatgcttacaactgaaacagctgctgaggttttttcttattttgcttcagatattcaagaagaactaattgcaggtcttcctgatgaacaaatgaatgcattacttgaagaactttacacagatgaaattgctgatttaattgaagaagttccagataatgttgctaataaaattttaaaaaatattgataaaaacactcgtaatattgttaacttacttttaaaatacactgatgaacaaattggttcaattatgtctgttgacattgtttatttagatgagaatctttcttcaaaacaagcactagataaaattagaacctataaagatgaagctgaattagtgcattattactatgtagttaatcatcaaaaacacattattggtgctattactttagaagatattgttttttctgatcaaaatgaattagttaaagatatttgttttgcaaccccgatagtaaaaacaactgatttaaaagaaaaagtagctcattattttgctgaaaatgatttttcagttcttcctgtggttaattccaaagaaagattagtaggaatgattacagctgatgatattattgatattgttcaagaagaagcaacagaagatatgtataaattagccggtatttcttcaaaaaaaattgatgattcttatgttaaaacaacagtgttgcaaatagtaaaatcaagaattttttgacttattattttaatgctaggctctactctttctcaagtaataattcaaatgtttactgattccattgcacaaaatcaacgtttaaaagttttgggtctttcaatttttataagcactattgtttccattattccagttatttctggtgcagctggaaatgctggttctcaatctgcaacaacaattgttcgggcaatttctctagcagaagttgaacgaaaaaacttctttaaacaagtatttttaaaagaattagctgttggtagcattattggcactattttgatggtaattaattttgtaagattattaatttattttacaattagtaaagatttattcaacaatcaacaacctcattatgaaatagtaactggtgagcatacaataaatattcaacatgtgcacaatggtttagcacacaaagactacattttgattatttcagcagctgcttctttttctttgtttttagttattattttttcaaaaatgttaggatcttcaattcctttattggcacaaattcttaaaagagatccagcagttatgtcagctccaattttagctacattaaccgattcagtttcaacatttatcttttttggcattaccattttagtttttgtacttatttaagttattatttttatgaatttcaagatttagtcttgaaactttttattttctccttaatttaatttataattaaatagttatatactaaaagaaaggaaacaaaatgagcattgatatcagaaaatatttagtgcctaaacatataaaagaaaaaccactaactttttctgtaggaattattttatggtttctactggtattttcatatttactttttgtagttgactgaggtctagcatttggtttaaatggaaaaaccggagctgagggatatggtactttaggttattatttccctacatctactgtatcagaaattactagtcaaggaacaaactttggaattacaattggtagagctattggttctatagctgtgggttgagcaattgcaaaacttacacataaatacgcagttattttagcgcttggattaatgctttttggaattatcgcaccttattctccaacatacactggttttgttataatgagacttttactagctattggaggaacaacaatgattgttttagtacaacctattgtttctgcatacttcaataacggtcaaaaagcagttatttcacaatttacaccttggttttatccaattggtaccattattacattagcaccatttgcttttgattcttcagtatcaaaagcagttagtgcttactgacaagaaatttacttgggatttggtttagcaactttaattccattagttggatatattttattaggttctagatttgatatttatccttcaacaattagaaaagaaaaagaagcacaattagcaaatcctaatcaagaaaaattatcaatttgaagatttattaaacaaaaagatacttgaatttgaacattattatatggaagctgattaatagcagttgtattcccttcagctttttcgaatactttattcgcgggaatgtccaataatatttattcattagatacaaaaatttcaacacaattcaatccaattattagtgtatttttaattatattcttatgtggtatatttgcaggaccatttactgtaggtttatgatctaagtacaaattaaaaagaagatactttattggattagttttaggtttaggagttttattttatgttttagcaactattgtatttttatacatggttgtaccagcaaatttaaattcttcaaaaacagacttagcaattaatggtttaggtaatggaacttgattattctatattttaggatttttaatgggagtaatgctttgaggaattcaaggtgttatcttaaatcttcctcacgaatacaaaggatcaaatcctaaaaaagttggatatcaatttggacttatctgaggattaggttatgcattttattctatagcaactgttctagttgcaggaattaaatcagcatcaacagaagctgcatatgcagtatttattattctagctgcactttcagttgtgggaattttactttcaaaagaacctaattcatcttacaaactttgaccttcaaaaggtattgaaaaagttaataaataaatttatatttaactaaaaaaaaaaaaaaaaagaggtacaaaatgaaagcaacaaaaataattttaattggagcaggtaacgtaggaaattctttcttatattcagcaatgaatcaaggtttagcttcagaatatggaattattgatttaaacaatgattttcgtgatggaaatgttttagattttgaagatgttgtagcatcatctgttagaccatttagagtttttgcagcagaatatgcagatttaaaagatgcagatttcattgttataacagcaggaagacctcaaaagccaggtgaaactagattagaacttatcaaagataatattagaatcatcagacaaataggacaaaaagtaaaagaaagtggatttagaggaattacagtaatagcttcaaatccagtagatattattacaagagcttatcgtgatgaaacaggctttgattactcaaaagttattggttcaggaacaattttagacactagaagattacaattcgaaattgctaaaagagcaagagtttctactcaatcagttcaagcttatgtaatgggtgaacacggagatagttcttttgttgccttttcagcagctaaaattgctggagaatgcttatgcagattttcgaaaactacaggaataactaaagagaactacgaacaagaattagaatatcctgtttcaagaaaagcatatgaaattattaacagaaaaagagcaactttttacggaattggtgctgctttagcttcaattattagaaatatcattcaagactcacgtcaagttatggttgtaggtgcaaacttacacggtgaatacggattttatgatgtaaatgttggagttccagctattattggaagaaatggaattgaacaagtactagaaatttctctaaacgaaaaggaaagagaaaaatttgtaaaatcagttaaaatcattgacacaatgtataaagaagctgaagaataatacctttaaaaattgtcaaaagcaggagaaaatctcttgcttttttgttttttctttattttgctataaaatttaaaattaattatgaagcaaacaaaaactaatcaaaaacttttgcacaatgtctatctagatatatttttggaagaaattaaaaaaagtgcacatcaaaaatttattgcttttagttgaagatgaaaagaagatctttgatatagttttattattcgtaaattagaattagattttgatttaaacaatgcaaatcttttttatttaaatccaaaaattcaagataatattaaaactgattctgttattgatcttggcaatttatatgtgttcaaacaagaagattttgtaaaaattcaagataaaattcatcacaaagactttcttaatccaaaattacaatctaaatttttccactttgctaaaaaagttattcaaagtaaaaaaattaatattttctttattagttttgattcaattactcaatcttttcaaagcaaaatcctttatttagaaaatcaagataacacatttttctttaataaacgtttaaaagaaaaaatcaaaacttcttcatttttaaaaaataaaatctttgaagaatcatcgcttcttttcaaaaaagaacaaagcatcaaaaacaatattttacaaaaagacaagcaaaaagcttatctaattatgaaacaattttttgatacactagaaagtttggattatgaaacacattttaaaaatcgtgcaaataaattttgaaacaataaacaagcaaaattaattgataaagccaaaattttatatggcaaaaaaagtaaataattattttttaatcttcaattttctttctgttttattaataagtcgaataatattttctttatgagctaaaataataaaaatatctccaattaataaacttaatggatttagtcagaaaagatcttgattataaaaggtaaaaaatgatatttgacctaatgaaaatcaaggaataaatgaaaggcaaacaaggataaatggagcaataagtgaagaaagagaaacgtatttactaatgaataaaatactaaaaaatattacaaaaccaattaaaacaattactaaattaaaagcaaaaaaagctccaagaagacaagcagcaccttttccacctttaaatttaaaataaagtggtcaaatatgaccaattatcacaccaatcgcggttactaatggaactacataaacaaattctgtaacatttttttgtaaaatagaaacaataattgttggtatagcagattttagaacatctaaaattaaagtaataatcgccattttttttccataagttcttaacatattagttgaaccagcattttttgaaccaacttgtcttatgtcttttttcttaaatattttagaaattaaaattgaaaaatttaatgaacctattaaataaccaataactaaaacaagaatattaaaaagaataaataaattcataatttgtaattttataaaaataatttataattttataaaattacagtaagattcatttaccaaacttgaaaataacaaaattattttgtttttttaaaattaatatataatttatatacttcaaaacttttagaagttggagaagtagctcagtttggtagagcgctacgtttgggacgtagtggtcgcaggttcaaatcctgtcttcttcaccatgggggggtagctcatttggctagagcgcctgccttgcacgcaggaggtagagggttcgactcccttcctctccaccatggctctgtagctcagttggttagagcgttcggttcatacccgaaaggtcaagagttcgaatctcttcggagccaccatatatcctagacataccgatttggacctatagctcagttggttagagcaaccggctcataaccggtcggtcactggttcgagtccagttgggtccaccatgggcaattacccaagaggctgaagggactagtcttgaaaactggcaggggtgttaaagcccgcgggggttcgaatccctcattgcccgccatatattacaaaaagttaaatacttttaagtgataaaacaaaaaaaattattttaatgcatcttatgctataatattgatgcattaaatcacatagcggagtagagcagttggaagctcgttgggctcataacccaaaggtcataggttcgaatcctgtctccgcaaccaataaggttcagtggtaaagtggttaatacgtctccctgtcacggagaagatcgcgggttcgattcccgtctggaccgccattatggctctgtagctcagtaggtagagcaacggtttgaagcaccgtgtgtcactggttcgattcctgtcggagccaccatatattcaaatacgaatatcggattatttatcataaaaaacaaaagattttacattacccccctagagttattagaaatttattaataattctagggttttttacatatttatacgttattatgtcagcagaaataattaaaggtcttattcttcaagtttatgagtttcaagaaaaagatttaattgttaaaacaataacaaataaaagaattttttcatttgtagcattaggaactagaaaaccagaatccaaaaataaatttgcacttttagaatcaagcatttcagaattagaaatttttttatcaagattaaacaacaaattatctaaactaaaaaaagcaactactgaaatcagtttagatcttaacaattctaaaatactagaattttgaagattcatttctttttttttaaataaattagaaaaaactagtaattatttttttgaaaatcttaaacttgcttgagagattattaatgaacaaaattatcttcatattgtagtttttttacttgctaatcatttagttttgcaaggtcattttattagttttaataaatgtgttaaatgtatgaaaaacaaaaatttaatatattttaatttttctctaggtggaatgttttgcaagatacactacaaaaacaaggatttacaaaatatttctttattaaaatcctattattttttaagtttaaatcttgatcagtatttgaaattcgttaatacaattgataattttttaatttatgaacaattaaagctttttattgaagctaacctttatagttttcctaaaaatttgttataatttttagaatttatgattagaattattgcaggtaaatatagaggtttacttattaaaaatcctgattttaatattgtaagacctatgtcggatcgcactagagaagcaattttttcttcattgcagttttttattcctgataaaagagttttagatctattttcaggaacaggtgcaataggaattgaagcactttctcgtggtgcaaaagaagtaattgcttctgaattagataaaaaagttttcgataacattgttgaattaaaaaataaacacagtatcgaaaactattttattcaaagaaaaagtgctttagttttgttagacgaagtacaaaaccaaaaattttctattatttttttagatcctccacatgctcaaatagaagtaactaaagcttcttttgccaaaatttatgattatcaaattttagaaaaagaaggttttttaatatataaaacaaatttaggtgcgcaattaattccggataattttaagattttaaaagaaaaaaaatatgctaagaacactgtatattttctacaatataaagatgagggataaatggcaaagctaatagtattaataggtccatcaggtgttggtaaaggaagcattgaagaaattctttttcaaaatccaaatctcaaaatcaaactttcagtatcagcaacaacaagagacaaaagacctaatgaagtagacggaaaaaattattattttatttctaaagaagattttaaaaataaaatcaaaaataatgaatttcttgaatgaaacaaacactttaataattattacggaacactaaaatcagaagttgataacattattaaagaaggttatagtcctattttagaaattgaaactgttggagcactaaacattatgaaaatgtatgagcaagcaaacaaaagtgatcaacttgttaccattttcatagctcctccaacatttgatgatcttaaaaagagaataattagtagaaaaactgattcacatgaacaaattcaattaagaattgataaatctttagaagaattaagtcaacaacataaattccaatatattgttgttaataaagatttaaaagtagcagcaaaagaagttgaaaaaataattttaaaagaagataaaaactaatgaaatattcaatattaacagaaacaggcgcaagaaaaaataatcaagattcagttttatttgtagaaaataaagacttttgattggctatggtttgtgacggattaggtggacattttgctggtgaagttgcttcttctttagtggtaaaaacttttaaatccttctttaacaagaaaaatttacctaaatttttaaacaaagttgcaatttatgattgatatttaaatactatttcagcagctagagaacagatgtttgaattatctaaaaaagatgaaagatatttagatactaaaaccacaatgacttcagttttcttcttaaaaaaagctaaaaaagcatttgttttaaattcaggtgattctagagtatatagtttttccaacaatcaagaactagagcaaattacaaaagaccataatcgtttaaattttgtgtatttagaaaaagataaacttactttagaacaagctctaaaaactgatgattgagatagaatagtttcttcaattggcccaaaaagcaagttctttttagatatttttgaaattaatgctgaagatttaacttattttttattatcttcagatggtgcttttaactttttatccaacaaagaatttcaaagcattttaagttctaaaaaagaattagataacatagcaatttcacttttaaaaacagcaattaataaccaatcagatgataatttatccttgattttagtaggattaaataagtaaatgaaagctcaagtaacaagagtcattgcaggattttatgatttgtgaattcctcgaagtaatgaatttttttatttacaaaaatgtaatggaaatcttcgtaaagataaaaattctccattagttggtgattatgttgattttgaaaaagaaggttttatttataatatttatccacgaaaaaatttttttactagaccaaaagtagcaaatattgacaaagcaatagtttgtatgtcaattgaggaaccaacattttcatccaaacttttagataagtttttactcatcattgagcaaaaacaaattgaaccaattattatcattacaaaaaaagacttaaacagtaattacaaaaaaatttttcaagactatatccaaatgaattattctattttttttgttgataataataactttgttttagaagaaaaattgttaaaaatgcttcaaaatcaactaatttttattatgggacaatcaggagttggaaaaactagttttattaataatttaactaatagcaatttccaaacacaagaaatttctaagagtttaaatcgtggaaaacacaccaccagagttgttcaaattgttttttcaaacaaaattaaaatcattgacactcctggtttttcttcatttgatattgaaatagcaaaaaacgatttaccaaaagcatttgctaattttagatatttatctcaattttgtaagtttagttcttgtttccatcatcttgagcatgaagaagattgcaaagtaaaacaagaactaaagaacaacaacatcccacagtctcgttatgacaactacatttattttttaaaaaattatgaaaacaaaaattattagtccatctttattaaatgtttcaaaaaatcaaagaattaaggtaagtaaaactctttttaatctaggaattgaatgaattcactatgattatatggatgcaaaatttgtacctaataaagcaattgaaatttttgaaataaaaaaaatagttaataaattttcaaattatattagtgatattcacattatggcatataatcctgaaaaaattattgatcaaattataaatgttgtcacatatgcaacttttcactatgaagtttttgaaaatgcttcaaatataaaggattttatagcaaaatatagttcaaaaattaaacttggaatagcaataaatcctgatacttctgaagaagttttacttccctttttagataaaattgatcttgttttagttatgtctgtagttcctggaaaaggtggacaattatttatagaaaatagctataaaaaaatagctaatttagctaagataagaaaagaaaaaaaatataaatttttaattcaagttgatggcggaataaaggattttaatgcaaaaaaagtctttgattctggagcagatgttatagtttcaggaacatatttagcagtaaaaccatcaaaacaaaaaatattaaagctattagctaattaaaattatttagataaattttattttatagtataattttattactttttatttttaacaatatttttaataattatatttttaaggagatttcatggcaaatataaaatccaaaatcaaagcaattgcttcaaatgaaaaagcaagagttagaaataatgcaatcaagtcaagagttagaacagctatcaaaaaagcaaaagtggcagcaatgcacaatcaagataatgttgctgctttagtagcaaaagcacacaaagaaattaacaaagcagttacaaaaggtgtatttcacagaaacaatgctgctagaaaaacttcaagacttgatttatttgttcaaaaacatcaatcattaaatgcttaaaaatataattaatattttagataataaaaaatccacttgataaaaagtggtttttttatttattttttaagatattaatccctgcatatgcaatcattgcagcattatctgtgcaatatttaaattgtggaattttagttatataaccttcatttttatagctcaatattaaatttctcaactcagaatttgcagctacaccacctactaaagtaattgtttttatatcaggaaaatcttttaaaaccaaattgatttttgattttaaataacgaataatgcttttttgaaaatcaacactaatttgaattttatcaacaactttgtgttgtttttctaagttattaatgcgatttatgacttgggttttaattccactaaaagagagattataaacattttcagtaacaggaatgctaaaatatttttcgactttgagattaggattttctttatttagtttatcaataatagggccgccaggaaatcctaattttaatctacgagcaattttatcataaatctcacctaaagcatcatcttgagttttacctataatttcaatatctttttcatttttagcataaaaaaactgactatgaccacctgaaactaataaagctaaagttggaaatttaatatctaatttatcctcattgtcatcttcaataaaggcggatcaataatgccccatcaaatgattcacagcaattattggtttgttaataactaatgaaattgctttagcaaataaaaaacccaattgtaaacttccaagtaaaccaggctcttttgtgtaacaaatgtagtctattttattgatatcaaagactttatttaattgatctaaaataatagctaaatttttgctatgttctcttgaggctaactcagggattgttccaccatatttttgatgaatattaatttgactaatgctaaacatatgcaaaactttatggccttttaatacagcaacagatgcatcatcatgtgaggtttcaatagctaaaaaatatttatctttaatttgcataattattcctgaaagtttttattttaacaaaattatggtaaaatattactcggtatgggtcagtactcaagaggctgaagaggacgcactgctaacgcgttaggggtgtgaaaacccgcgcaggttcaaatcctgtctgacccgccatttttttattgctttttttaagatagaaaaatggctaacaaaatagcaataataacaattgcataaattgaatacgctactttataataaataaaatgagttcgagtttgttttttgtttaagttagaatctaaagtcattgcataacttatacttctaaatttatcaagacgtttttctccaaatcaaacaatcagtaaaaataaacttgatgccacgtaaggaactaatcaagtaaaaatcctacttgaaaaattaaatacttttaaataataatcaccttcatttgcgattagtggatttgcattagtaactgggaaataatttttaaaaactattaaagaaatcaaatcaattgaaccaagtccgcttggtgttggatttaaattatttgaaattgttaaaatattagaaccagctaaaaatttaatataatctacaaaagaagtggattctggaaattcacttgcataattacttaactcatgtgctgtgtatgttgtttgtaataaaataaaaaaactcatattaattaagctaaaaataatagctttgtaaataaaagtttccaaaaagaacttaaaatccttaataacaaattggaaattctttttaaataactgtgcttctgcttggaaaaagaagtccaatctgttcttgtcttgtaagattttcaaaggattaaaggaaattaatcaaatacctaacttaatgcattttagctgtaattttgaccaaatggataaaactaaaataactaatgtcaaaaacaaattaataaacatagtaaatattaatcaaaccaaaagaatgattttattaacgctatcaaaaacaagtaagttatctctataaaaatataaagctaatggaaacattattaatgaatatattaagagataaatttgatgtaaaaatgcagagtaagtaaaagctgataataatttacgtaatttataaccttttttttgcaaatatcaatattgaacaatttctccaccgaagtaaaaaggtgttgaataagcagtaaaaatccctaaaaataaagctaaagtaatgtgtctaaacttcattggtacatctatttttttcatcacccgatacatcaaaaaaccacttcctaatgcataaaatacaaaatataaaataatgtaaataaaaaataaacgtttttttgtattagctaaaaacacatcataaaatccgtttaataatgttgcaaaagattcttcagcattttgattagttagtttgtagacttgatagaacaaaaaaattaaaattaaaataattattgaagctaaaataaagacttttatagcagtttttttcttttgttttctttgtaattgttgctttgcttgattctttagttcttttttaatttgattttcaataataattgcttcttgataactttgttgatttaaatcagaaattacaagagttttgagttgttgttttattttgtcgtaaataagaaaaacaaaaacatttttccctaaaaatactttgattttttcaaatcttgaatactgatttgcttcaataatttgaaaatttttaatatttagtgaagcaaaagttttgtctttttgaatattttgataaaagttttgaaaataattgtaagttaaatttattttaaattcatatcttgattcaaagtttaatttttgctttaattcttgaatgtagctaaaaaagtttgtgtttttttgttttactacttctaacatttttacataaaagaacatttgtgaagttaaatcaaagttagaaaaattagcttttggaaaatagaaaacttgatgctgatttattaaaaatacttcattttccctgtttttttcgattaaataatcttcaatgttttcttctgagtaaaaaataatttgttgttgaaaaaaactctttaaaaatttttttataaactcaggagtttgagtataaacaagaaatttaacctgtttattatctaaatatttttggtttaaaaattcaagaaaaattaattgtaattcagcttttgataggtattcaaaaaatagtttatttttatataaaatatctatatttttgttttttagtcaaaaaattacatcggtgtctttagttgcatttctagcaattttttttcaaataattccttgatttaatttattaagaaaaagttttttattgtaattgaatttaatttcactcaacggtaaaaaatgatttttattaatataaaaaattgtttggcgtgtgtcttgatttaaatcattaaaaaaggaatatttatgttttaattcctttaaatgcaaaagataaaaatcagctttttgttctatgttttgctttagttttaaaggatcaatttgtttaatttgttgatctaaattagatgttgttcatctcgaatcaatttcttgtttttctaagcttatattattaaattgatcaatttggttttgatctagaacatttcaattttttttaaaaatatttatttgaaaaaagctattttttttatcttcgaaagaattaagataaataaaaaaatcaaaaccttgtttagttaattcgttttttgtttgtcctcaagaaaagttaggatttttttcaaataaaattaaatctatatcagtttgagtagataaaacaaaataaataattttgtaaaagttagtatttatttgtttattttctaggtttaaaattacttttggtctttgatttgacaataacaaaaaatgctttaattttaaagcaaaattaaatacattttcgatgttaaattgatattttaactcacctacagaagctattatttgtgatttatatagttttaatggctcaaaatctttagtttttatttgtgagttatttttaaaaatatctttacttcaaatacttacactattcataaaaaaatttttattcatcaaatgaatcaagttctctttgtgaactatataaatcaaatgcctcagcttctttttgtattacttcatctgtgttattatcagctacataataatcaaattctttaaatttaggcaaatcttttaatgatcttaatttgaaatagtcaaaaaatttgtttgtaactccatataaaattggattaccaactgttggtgcatttcctaactcttcaacaattcctttagctaataaagaaccaacaattgaatcagaaatttttcctcctctaatttggttaatcattgaacgagtaacaggttgtttataagcaattatcgcagctacttcaattgctgaatttgttagcttatattttctttcattgcttacaaaatcaattaaaaatggtttaacgtcttttgcagttacaaatttaaaaacatcattgaactcaacaattgtaattcctctgttttctctgttgaatttaatcatatagtcttttaaaagctttcttgcttcatttattttttcaagttttaaagattgttgtaattgttctgaagtaagtccttgttcaccttggacatataataaagcttcaataactctatatttcattttcttctcctcctttataaattttaatatcaccaaattgtttatcttgttttaaatgaagaatgtgtttttttgccatttctaatacagaaattaaggtaattgaaaaatgttttaatgttggaagcgcaaacacttgttcaaaatccagcatatcatgttcttttaaaagctttaaaacataattactttgttgttcaggatttacttgtatattatcagtttttatttgaattttttctttagctgtgtttctttcaaacatcattctcaaaatttcaattagcttcatttgtgaagactttccatctaatttactattatctttttttcttttaaaatcagaataactacttgctggtttttcatagtaattatttctgtgatctagttgttcacgaagcatttgcgcaattgctttaatctgttgatattcatatagcattgctaatattttgtttttatcaatttctaattcttcatcaacttcttctgttttatcaattaacaatgctcttgctttgatgtaaattagtgtagcagctataactaaatattctgaagcaagtttgatgtttttgtcttttaaatgatcaatgattttaatatattgatcagctagttcaacaacatctacatctttgatttcaatttttttacttcttactaaatctagcaataaatctaatggaccatcatagtttttaatttgaatatttaaattttgatttaaaaacattttatttacctttttttagttctttttcagctgtgtgtttgacatagttttgttcaattatatttttggcttttagagcaagtgcttctgcaggttgagatgctacaaaaggagctttaattggtttgtgaataataacttcaacaactaatttttcttttctattgctatcaaaaactcttcctgaattatttattgttattggaattataggtaaaaattgttttttagcaattttaaacgcaccgattttaaaattttgaatatgtccatcctcagttcttgttccttctggaaagacaacaccataagtttttttatctctaacaaattttccaaaatcaactaatgtagtaaatgattctttaattttttttctatcaataaagaaagtatctattaattgaagaattcatttagtaacctttttgttttctaattctttttttgctaaaaaagttaatacattttctttatcttgttcatctttattttgtttttctaaagcagaataaataattaacgaatcagcattagaagcatggttggccacaaccattgctggggttttttgtagattttcataaccttttatttcaacttttacattataaagttttagtagtgattttgtatattttaatactaaactagatctaaagtgtggcgaaagttccttctttttctttatgtgtttttttgaaagtgatctaattttgttgattctataagctcataatcagcttcataatacaagttttagtttaattatcatattattccttgatcttcataacaactgctacaacaatgttttcttcattggaagtagaaataaaaaattgtttttcaaaatgttctatgaagtattttctatcattatattttaaattaattttattaaaataaaaaaaagaattatcacatttaaacaaggcctctttaattgctcatctagttgctaaaaatcttaatttatcttcttcaaaatcaagtaaagaatattctaaaatttctttgttgtgaagaattttttttaaaaaagtttgagatttatttctaaatctttgaatatttgcaatatcaattcctatcataaattaactttctcttgattttttcttaaatttttcccttttttgagaaaaaactttaaaaaattataaatgttaattgtatgataatgaaaaacaaagggatgattttagaaaaaattcttaatctaacaatagatttttactgaaaaaataacattgctatttgtcataagaaaaatttagatattcaatttaaaaaagtaaatgatgatttgcaattagaaaaaagttatatttctagaaaaagcacagtcgactattatggaatttacaaaggaatttttttggcttttgaagcaaaaagcacaaatgaaaataaactaagtttaaacatcattccaaaacatcaaataaattatcttaagaaaataaaacaacactttggttgtgctttttttgttattttatttaaaacagaagagcgttttttcttgataagtattgataaaattgattttgcaaaacaaaaatctttaacaattgaatatttaaccaaaaacggttttgagctaatgcttacatatcctggaattattgattttgttgaatttattgataaaatgctttaaatttctttaatttattacgcttttgtagtaaaatttgtaaactattacttaagaatatatgtcaaaacaaaagattttgataaattataacaaaaataagcattaaaatggattcggttgggtgtgcaaaattgtgctagccgttagaaattttaagaagtaaaacaaactaaaggaacataaacaatgacattaaaatcagaaaattcaaaaatggaaaaagaaaataaaacaaaatcaacagaaccaaatgtttcaaatgaaaacactaaagaaaattcacaacaaacagaattaactcctattgtttctaagcaaaaacttttagaagctggaacatattttggacacaaagcttcacaatgacatccaaaaatgcaaccttacattttaaaaagaccaaaaaatggaactcacattttagatgttgttaaaactcaaaaaacacttgaaattgcttatcaattaattaataaattggctttaaaaggtgcttcatttatctttgtaggtactaaaaaacaagcaagaaaagtagttgaagctcaagctgaaagaacaaattcaatctatgtttcagaaagatgattaggtggaactttaacaaacaaaaaaacaattttatctagactaaaacaaatgcaagaattagaagaacatgctgaaaataacttcagtaattacaccaaaaaagaaggtgtattgatgtctaaaaagcttgctaagttacaaaaaaacctaaatggtattagaggattaaaattcataaataatgataaattaattatgttagtagcagatccaaataaagatattattgctattaaagaagctaaaaaagcaaaagtaaaagtaataggaattatggactctaacaccgatcctgctttattagattttggaattccagcaaatgatgattctgtaaaatcaattacattaatttttacagttttagcagatgctattgctacagctaaaggcggaaaagctttatttgcttaccaaccaacagaaaatatagttcttccagaagatcctgataaagaacacaaagcattaaataaatttagaaaagtaagtgcagaagttcaaaatcaagtacatcacaaaagttttgtggctaaagcaaaaccagaagtaacttctcaacaaaaagaagaaaataaacaccaaaaacaaggagaataaaatggcagcagacttgatgcaaaaaattaaaaaattaagagaaattacagatgcaccttttattgattgcaaaaaagctttagagcaaacaggtgctgatttagataaagcagttgcttgattacaagaaaacggaaaaactaaagcacttaaaaaagctgatagaattgctgctgaaggtttagtttttgctactaaaaatgaaacacatggtgttatagtagaattaaactcagaaacagactttgttgcaaaaaataaaaattttgttgaattattacatttaatttcacaaactttattagaaaatgaattttcttcagatcaagaagcatttaaattaaaaactaaaacaggaaagtcaattgaagattcaataacagatgcaacagcaacaattggagaaaaaattagtttaagaagatttgaaaaagttgcaattaaatctgatgaacaattaggagtttatattcaccacaatggacaaattgcttccatagtattaataaaatcagaaaaagaagcagttgccaaaaatattgcaatgcacgttgcagctttaaatcctgaatacatttttgtcaaagatgttcctcaagaacaaattaaaaaattagaacaagaattcaaagcatctccagctctagcaggtaaaccagaaaaaattcaagaaaatattttaagaggaatgatgaataaagaattagctaaatatgttctagttgctcaagaatatgctttagaacaacaatatacagttcaaaaatatttagaaactaatcattcagaattattaaaagttgttagatttgaagttggagaaggaatcgaaaaacagtcagtagattttgctcaagaagtagcggcacaaattaaagaaagtcaaaaataatataatttaaatttttctatgtaataatagaaaaatttttgtattttttatgttagattttttaagtaaaagatttcaaaaatcatttgctaaaatgaatgctaaaactacacttaaggaagaagacttaaatgaagttattagagaaatcaaattagcattattagaagctgacgttaacttattgattgttaaagattttattaaagaaattaaagaaaaagctttagcaaccgaaattacttcaacattaaatccacaacaacaatttattaaaatcgtaaatgaaaatttagttcaagttctaggtgaaaaaccaaaacaaattaaatataatagaccaatagaaaaaattgttttagttggtcttcaaggttctggaaaaaccacaacagttgcaaaacttgctcatttttcacttagaaaaaaacatattcaaaaacctttattaattgctgctgatatttaccgtcctgctgccattgaacaactaattcagttaggaaaacaaattaacattccagttttttcacaaaaagatagtactccacaagaaattgtaagtgcaggacttgactacgctagttccaatgattttgatttagtgattatcgatacagctggtagactttcaatagatgaaaaactaatgcaagaactaaaagacatagaaaaaattgccaaaccgcatgaaattttctttgttgctgatgctctttcaggtcaagacattataaatgtagcaaagacatttaatgaaaacattactctaagtggttcaattatcacaaaattagattctgatgcaagaggtggagcagcactttctcttattaaattattaaaaattcctatagtttttatcggtactggtgaaaaaatcacaaattttgacttattttatccagatagaatggcttctagaattttaggtatgggagatgtactttcactaatcgaaaaagcagaagaagtaatcgacaaagatcaaataggaaaaataggtaaaaaaatcttttcaggaaattttaatttagatgatttactaaatagtttatatcaaattcaaaaactaggaaagattactaaaattattaaattaattcctggtatggcagataaaataaatgctgaacaaattactgaagctgaaaagaaaataaaactttatgaaattttaatatcttctatgactttagaagaaagaaaaaaacctaaattactaaaaaatgattcaagaaaaagaaggattttaaaaggatctggtagaagttcacaagaattcaatagacttttgagtgaatttgaacaaatgtcaaaaaaaatgaaggaaatgtcacaaaacaaaggtggtattttcaattcaatgatgcaaaataaattttaataaggaacaaaatggaaaacaaaatagaaatgcaaactttaattaatcatttaaaacaattcggttttgtttttcaaggatctgaaatttacggtggtttagcaaacacttgagattatggtcctttaggagttttactaaagaaaaacattcaagatctttggtgagattactttataactaagattcataacaattttgcaattgatagcaaaatattattaaatccaaatgtatgacaagtttcaggccacactagcaattttaatgatcttttaatagaaaataaagtcaataaaaagcgttatcgtgttgatcatctttttgaagaacattttccaaatctgaattttaatgacttttcacaagagaaaattttagaacttttaaaagaaaaagttttaaaatatgacaattcagcaacacgatgagaagaaataaaacaatttaatttaatgtttgaaacccaacaaggtgtagttgaagataaaaaatcaaaaattttcttaagaccagaaactgctcaaggaatttttattaactttaaaaatattcaaaggtctatgagattaaagttgccttttggtattggtcaaattggtaagtcttttagaaatgaaatcacaccaggtaattttatttttagaactagagaatttgaacaaatggaacttgaaatcttttgtcatccagaacaagctaaccaaatttttgatgattatttgaacaaaattcaagattttttatttaatgaattaaaaataaacaaagatttagtaagagttagacatcataagcaagaagaattagcgcattattcattggcaactagcgacattgaatttttatttttatttggttgaggagaactaatcggattagcaaatcgttctgattttgatttaaaagctcattcagctgcttcaggtgaaaaattagattatcttgatccctttactaatcaaaaattttttccttatataattgagccatctatgggagttgatagattgttgttagcagttttaactaatttttacaaagaagaaaaattagaagaaaacgaagaaaaaagaagtcttttagcgttaccttactctctttctccatttaaagttgctattcttcctttagttaaaaaactaagtcctaaagctttgaaaatttataatcttcttcttaaaaattctatttctgcaacatttgatgaaaataattcaataggaaaaagatatagaattcaagatgctattggtacttatttttcaattacagttgattatcaaagtttagaagataatacaattacaattcgtgagcgtgattctatgaaacaaagtagaatcgcaattgatcaattgcttaacttcttagaaaaggcaaaataaggttaatgctaaataaagaaattgaaactataatcaatcaagttaatatttttgaagtaatttcaaattttataaatttaagtaaaaaaggaaatgactttttaggtctttgtccttttcatgaagattcttcaccttctttatctgtttctgtatctaaaaaaatctttaaatgtttttcttgcaatgttggtggcaatgtttattattttgttaaacgtcttaacaattgaaatgatttaaaaaccctagaatactttgaaaaaacattcaatctaaacttaagttcttcacttatcgcaaaaaatgttaaagaatttactccaaatgaagaaaaagctttaaaagcactagaagatgcgtttttatttttttctttagaactcaaacaaaatagtcctgattatcttaaaaaatatttactacaaagaaatttaacaaaagaaataattgattatttttctttgggatattgtccaaaatcaggaattaaagagaaattgttaaaaaaaggacatgatgaagcaattttactaaattattcacttctttcctttgaaaacaagacagacatttttcaagatcgtatcatctttacgattaaaaattcagaaggtcaaattgtaggtttttcagctcgtaaaatcttagattctactctagggccaaaatatattaattcatctgctaattctttatttgttaaatcacaaattttatataactattcaaatgcaattcaatatgccaatgcttcaaaaactttgataatttgtgaaggatttatggatgtgattgctttttttagagatgaagttaaaaatgttgttgctcttatgggtacagcattaacaaaagatcacatttcttatttaaaaccttttgaaatcatattaattttagattcagaccaagcaggaattgatgcatcacttaagtcaatttcactacttttagaaaataaaatttctatcaaagtactaaaaagaaaattagaaaaagatccagatcaatattttgttacaaatggtaaaggatcattaaaattagaactggacaacacgcaagatgcaattcattgagtttacaagaaattatctgaaaaaattgttaaaaatgatttaaaaactctagatacttttatttatgatttttcaaaatatttacaacattattctataaattttcaaaacaattttattgaacaagctgaaaaagatttttctattcctaaggcttcttgaaaactcgtaaatcgctgaagttctaattcaagatattattatccagaaactactactaacaacgacaatttatcactaatacctgcttctaacgatttagaaactttaggtgttgaacctaaacacccactatttcaaaaaaaagtatttaatatatctcaatcagaaaaaattcttttattttctttattacataaacctgaatttttaaaaattatcactttttttaattatcaatttcaaacttcaatatttcaaagttactattctgaattagtagctactaattttaatttagatgtgattaaaaaagtttattataaccttaatgcgtcttcaactatcaaaggtaaaacattaaaaatagaaacttctgcagataaaatagaaatgctgattaaaactttaaatatagaaaaacaaaaacaaaaaattgcaacactttcgaaattattaaaaaataaaacttcttcagaacaagaaattaaacgttctatatcagaaacacaaaaagaaaacagtttaaacaaaaacaaactacaaaaataaaatccaatccttaaaaggagttattatgacaacaaaaaaaacaacttctacatctgcaacaacaactgatacattaagttcttcaaaaaaaccagcaaaaaattcatctacaaagaaaactcaaacaaaatcaagcgcaaatcaagcctcaaccactaaatccaaaaccaaaacaactaaaaaaagcacaactacaaagcaaaacacaactaaaacaactacgaaatccacaagttctaaaacaaaatcagaaaaaagtggttcttttgatatgtcatcattaattaaagaattaaaagcaggaatgaaagcgttaaataaaaaatatttaacacaacacgaagttatgcaatttttagaaaaaaatagacttgaattagatacagatgaagcagttgaagaatttttaaatacattaattaaaaacaaaattctaaatacagatgctgatgatttagataaagaagatattgatgtaaaagactttgcccaaacaatcaaagaaaaacaatatgatctaagtcatcacaattatgacgattcagattctgatttagcttttatggaatcactaaaagatgatgacgattttcttgaagatgattctttggatgacgatgattttgaagatgatttaaaaattagggatattcatgatattgaactagacaaaattcatattaattccaaaagtccatatattttgaacgatgcagcttataaaaataagttatccgatactaatgacatcatcaaatgatatatgcgttgaataggaaaatatggaaaattactaactcctgaagaagaaaataatttggcaaaacaaatcaaaaacggtggtcgtgcaggtaaaagagcaagacatacattgattaatagaaatttacgtttagtaattaataacgctaaaagatacaaaaatcgtggtcttacttttattgatttaatttctgagggaaatcaaggaattttaaaagctgttgataaatatgattatacaaaaggatataaattttcaacttatgcaacttgatgaattagacaagcaataactcgagctgttgctgatcaagcaagaataattcgtattcctgtgcatatggtggaaactattaacaaaattaacaaaatcgaaagagaattacagcaagaatatggggttactccaactgatgagcaaattgctgaagttatgggtggtgattttacagctgaaaaagttagatatactaaaaaaatcaatattgaccctatttctttagacaaagcaattggtaaagaagaagatagctcattttcagattttattaaagacgaaagtgtaatttctccaatagattactctgaaagagaagaaaaaactaaaattttaaaacaaatgattgaaaataatcttgacaatgatgaaaaagttttcattatgaaacgttatggatttggaactgatccaaatggtgaacaatacagaatccatagttttgatgaattagcaaaagaaagaggagtaactaaagaaagaattcgtcaaattgaatctaaaattcttaaaaaattaagacatccacaaaaaaagtgaaaacaaagggatttaatttaatttgaaaacaacaattagtcaaatttctaattttttaaatgaaatttttccacttgaaaaagctgaactttgagataaatcaggttttagtttttattttaataatatagtttcaaaaattattatttgcattgatttaacacctgatattttaactcgagcactgcaacaaaaagttaatttgattattactcaccacccttttttattttataaaaccaaaaaagaaaattatcaatttagtccatataaaaaaacaatggtcaaagctataaatcaagcaaaaatcagtgttttttctttgcatacaaattatgactcaagtaatcacgcaacagctagagctattttatcttcattggatttacaagtatcttcaacacaagcaattgatgattataatcttttagttaacactaatattaaatttttagaacttgtttcaaaagttaaaaatactttaaatttaaagcatttacaaacaaatttgcaaaaaaatttaacaattaaaaaattagcaattttaccaggttcagctggaattgaagcagttttattagccaaaaaacataaagcagatttggtaataacttcagatttaaagtgatcagatcaattggcttttgtttataaaaaggttaatgttcttttagtttcacatttaattgaacaattttttgtttttgatatcaaagcaaaattagaacaaagttttaaaaatagctttgacataaaaattgaattattagaagaaatactttacaatttataaggaaaataaagaaaaaatgattaaattaggttctcatatttcatttaaaaaacccggttatttaactaatgcagttgaagaatcacttcaaaataaagcaaacacaatgatgattttcctaggtgctccacaaacaactaaaagggttgattttgctaattataatttacaaacttatttagaaaaatatcaaaatcttatcccacctgaagatattatcgttcatgccccttatatagtaaatccttcaagtgtgacaaaacaccaattcgccaatgattttttaattcaagaaataaaacggatgaattacattggagctaaatatttagttttacaccccggttcttatacaacttttactaataaacaagctcttgaacaattgattaaatctttaaaatacatactttcacaaacaaaaaacgtagtaattacaatcgaaacaatggctggaaaaggtactgaagtaggtacaacttttgaagatgtagtttatgttgtagaagctgttaattcagaacgtgttggtgtttgtttagatacttgtcatgtttgagatgcaggatataatttgcacaattatgaagaatttatagcaaaaataaaatccactagattaataaattatttaaaagttattcatctaaatgattccaaaaatgagttaaattctaaaaaagatcgacacgaaaatattggaaatggttttattggttttgagactttacaaaaaatagtgcatgatcctttatttgataatattccaattattttagaaactccttgagtagataataaaccaatttacaaagaagaaatagcaaaattgcttcaaaaataaagaaaaacaagtttgagaactagtttttctttattttaaattttaaaaaattacgcttttcgaaaataaatataaaacgataaattactttaacaaaaagcatatgtaaaatatttaagaaccaaattgttaccaatctaagtgttcaaacaaaaaattctcatttatttgaaatcttcatctttttaacaaaagatcaatgtgaaaatgagcagattctcttttcttagaaaaatagaaaagggaattttttatgaaatattcaatagaatttaaattagaatgtgtaaaaaaatacaaaaaaggaattgaaattaaaaagcctgattttgctaatacaagtcaaaaaaattttttaaatcaagtatatttttgagaaaaaatttatgacaaattaggagttgaaggtcttaagaaaaaaccacgaaataaaaagtgaactatagatcaaagattaaacatagttaaaagatttttagctggtgaaccaattgttaaaatttcgcttgaaaataatcttaatccaagtctaatatctttttgagcgaaaaaatatttagaatcgggaattagtggtttagaattaaacaaaggaagaccaataatgaaatctaaaattcttaatgataaactttcaaaagtttcaaaaaatttaaatagtaaaaatcaatcaaattcttcattatctgtatatgaagaactcaaacttcttaaaaaagaactcaaacactttaaaaaaagagaaaaaaactttgaaaaagaaattaaacttttaaaaaaggaaaatgaagttctaaaaaagtgaaaagccttggtagagatctttgattcaaatcaaccaaggcaagaaaaaataaaaaaaatttataatagagtaaaagctgataaaaatcttcgattaactcaagtattaaaagagttttctattcctatatctactttttattatgaactcaaaaaaagaagattttgacaagaaaaatgaagaaattataagccaaatgaagcttatttttgaagaaaataaagcaagatatgaaaaagaagaatcaaagctgaacttaataatagaggctataaaattggacttaaaaaagttcgcagattaatgaaaaaattcaatctcaaagcaatttgttctagaagaaaatacaaatcttacaaaggaacagttggcaaaattgcagacaatattttaaatagaaattttgttgctactcaaccaaatcaaaaatgaactacagatgtaactgaatttagctgtccatttggaaaagcatatttatcaccgattttagatatgtttaatggtgaagttattgcttgagatttatctacaagcgctaacaaccaacaaattagaaaaatgcttcaaagagctttttgaaaacacaaaaatcttgaaggtttaatttttcacagtgatcaaggttgacaatatcaacataaacaattttcagaaaaattaaaacaaaaaggaataactcagtccatgtctcgaaaaggaaattgtttagataatagcatcattgaatcattttttgggacattaaaaagagaatgtttttatggtcgcgaaaaagaatttttaacttttaaacaatttcacaaagcaattgcaaattatatttattattacaattacaaacgaattaaagacaaaataaaatgaatgtttcccattaaatttaggggaacattcatttcaaattataattaatttaattatttaaaattttattaagaaaagggtatcacctcgaatgagtaaatgactttcataatcaaataattatttacttaataaaaacaaaaaaatatttggtgtttttaaaaaaaggaatataattaaaaaactaaatttaggactatgaagcataaggttgcgatacactaaagagagttgttagttagttatcggtttttatgtagagtctggttttagaaaaaaccaaaggagacaacattttatttttatggataaaattcaaattaaactaaaagcatttgatcatcgtctaatagacaatgcaacagcgaaaatagttttagttgcaaaagaagcaaatgccgaagtaagtggtccaattccactaccaaccaaaaaagaaatctttactatcttgagatcagttcatgttaataaaaaatcacgtgagcaattcgaaagtagaacacaccaaagattaattattgttaaaacaaacagttctaattcaaaagtattagtagacaaaattaaaagactacaactaaattctggtgttaaagtaagtctagaattatcataggagaaacatgaaaggtattttaggtaaaaaagtgggaatgacacaactatttacagaagaaggaattagcattccagttactgttgtagaagttcaacctaacgtagttacaaatgttttaactaaagataaaaacggttatgaagctattcaattagcagcatttgacaagaaaaaaagcagatttacaaaaccagaattaggacattttaaaaaagctgatactgaaccaaaacgtttcgttaaagagtttagaaatatgcaagctgaattaggacaaaaagtagatttatctatatttgaagaaggtgaatttgttgatgtagttggaacgtcaaaaggtaaaggatttgccggaactattaaaagatataaccaacacataggtccaaaatctcatggtggaggtggaggttctaaacctattcgtcaaacaggatcaattggtgatatttcaggaaacaaagtagttaaaggtatgacaatgccaggtcatttaggacatgaaagaactacagtacaaaatctagaaattattaaaattgatttaacaaataacattttagttattaaaggatctgttccaggacctaaaaaatcatttttagttattaaagaatcagttaaacaagctcctaaaaaagcagcagaagttttagttgattattcacaaacacaatcagaggaggcaactaatgaataaaaaagaaaacacaactcaaacaagtaatgcccctaaaaaagaagttattaaaccaagatcttcaacaactcacacacatgtacacaaacatacacatactcatgtacatactaaaaaagttgaaaaacaacctgaagttcaacaagtaaaaacacctgaaaaagcaacaactcaagcaaaagtagttacaaaagcagctccaaaacttgcaacaaaacctacagcttctgcaaaaacaggcgagaaaaaagttgaaatcaagcaaactaaaaacgtagcaaaagtaaatattacaaataaagtttctttaccaaatgaattatttggaaaaactgaaattcactcacaagctatttttgacactatattatacgaaagaggatcacgcagaaatccaactcataaagtaaaatcaagagcagaagttagtggaacaggtaaaaaaccttgaaaacaaaaaggtacaggtaaagcaagagctggctctctacgttcaccaatttttgtaggtggtggtcgtgcatttgggcctacaaataataaaaattacaaaattaaattaaacaaaaaagttcgcaaattagcttttgcctcagctttaagtcaacttgctcaaaataatcaagtactagtttctgattttgcacaaaaagaaatttcaactaagacactagttaaaaaattagcttctgaaaaattaaatgaattaaaaaatgtgttaattatttcatcatcttcagaacttttcttatcagctcgtaatttacaaaatgttaaagttacaaaatgaagttcaattttagtagaagatttagtaaaagcagatgtgttcattatttcagaatcagatattaaaaacctagaaggaagatttaaataatgaatataaatgaaattattaaagctccattgttaacagaaaaaactcatttacaaatgtctgaaaatgtttacacatttaaagtagacagaagaacaaacagagcagaagttaaaaaagctgttgaacacatttttgatgttaaagtagcaaaagtaaatatctttaatgtacctaaaaaaccaaaaaaattaggtcgtttccatggatttactaatgcttataaaaaagctatagttactatatctcaaggatcaattaatttctatccagaagatactcaagaagaaaaagaagaaaaattaagagcagaacaagaaataaaagctaaagaaactacattaagagaaaaagctaaaaaaatagaagaaaaagttgccaaaaaattagctctaaaatctaaatcaatcacaaaagtagaagaaaaagaagtaaaatcaactactaaagaaactgcagatgctaaagttaaaaaagcaactaaaggagagtaaatatggcgatgaaaacatataaacctacaaccaatgggcttcgtaatatgagctctttagattattcaaaaaacttatcaggacatactccagaaaaatctttacttgttatcttgcctaaaaaatctggtcgtaataacacaggaaaaattacaataagacaccaaggtggaagaagcaaaagaaaatacagaattatcgattttaaaagaaataaatttgatattccaggttatgtaaaatctattgaatatgatccaaatagatcagcaaatatttctttaattaactatgttgatggagaaaaaagatacattttaactccaaaagatttaaaaattggtcaacaagtaatttctagtgataatgcagatattttagttggaaactcacttcctttatcacaaattcctgaaggtacatttattcacaatgttgaattaaaaccaggaaaaggtggacaacttgctcgttcagctggatcttcaattcaaatccaaggtaaagatgaagatggaaaatatgttgttttaaaattaaaatctggtgaataccgtcgtgtgttatctaaatgtagagcaacaataggtgttgtaggaaatgaagaacataacctagttaacattggaaaagcaggacgtaatcgtcatttaggtattcgtccaacagttagaggttctgtaatgaacccaaatgatcacccacatggtggtggtgaaggtaaacaaccaattggacgtaaagcaccacttactccatgaggtaaaaaagcacttggaattaaaacaagaaataataaaaaagcttcaactaaattgattcttagaagaagaaaggatactaaataatggcacgttcattgaaaaaaggtccatttgcagatgagcatttacttaaaaaagtagaggcgatgaatgaacaaaaaaacaaaaaaccaattaaaacttgatcaagaagatctacaatatttcctgaatttgttggactcacatttttagttcataatggaaaaatcttcaatgaagtttatgtaactgatgatatggttggacacaaattaggtgaattttctcctacaagaacatatacaggacatggacaagacaaagggaagaaaaaataggtaggcattagttatggaaaataaatcacaacaagcaagagctagtgtaaaaatgcaacgtatttcagctcaaaaagctcgtttagttgcacgtttaattaaaaaacaaccaactacaaatgcattagctattttacaaaatacaaataaaaaagcttcatatttcttcataaaactattaaactcagctgtagcaaatgctgttaataaccatggattaaacggtgatagtttagtagttaaagatgtaattgtaaatgaaggtccaacacttaaaagatttcaaccaagagcaaaaggtgttgcatatcgtattttaaaaagaacttctcatttagctgtagtagttgaagaagtaagtttattaggagataaataattatgggacaaaaggttaatccaaatggatttagatacggagttactaaagaacataatgcaatttgatatgctgataaaaaagactttgctccaaatcttttagaagatgttaaaattcatcgtttttttgaaaaaataacaagagaatatttaattggtaatacaaaaattcgtcgtgatcaagataacaaagtaacagttgtagtttacactgcaaaattaggtacttttctaggacaatcaggaagtaatcttaaaaaaataattgaagatgttaaaaaatacgttaaaaataaaaaacttgttttaaacatagatgcagtagaaattgaaaaaccagatttagatgcaaaattattagctgaatcaattgcaattaaattagaaaaccgtggatcataccgtatggcacaaaaatttgcaattcgtttagcacaaaaagccggagctaaaggtattaaaactaaagttagtggtcgtttaaatggtgttgatatggctagatcagaaggatattctgaaggtgaaatgaaattacacacacttagacaagatgttagttatgcaacagcaacagcaagaacaacttatggagcacttggagttaaagtttgagtttcattaggcgaagtatttgcaaagcaaaatcaagcatataatgaagaagaaccaacacacaaaaaaggtccaaaaagagcagcaagagttaaaaaagaaagtacaaaggaataaaaatgttacaacctaaaaaaacaaaacaccgtaaaacatttagagtaaaacatgacaaacgtgctgcttttagaggaaaagaagtttcatttgaagaatttggacttcaagctacaacatctcaatgaataagtgcaagacaaattgaatcagcaaggattgcgattacaagaagaatgggtcgtgaaggacaagttaacataagaatcttccctcatctatctcttactaaaaagcctattggagttagaatgggatctggtaaaggttcagctgaaaaatgagtagctgttgttaaagaaaatacagttatgtttgaagttggtggagttaaagaagaaatagctcgtgatgcacttcgtttaggtggacacaaactaccagtaaaatgaagaataattagcaagggagaataatggaattcaaagatttaaagaaaaaaactactgagcaattagaacagttattaaatgaatataaatcagagctttttacccttcgttttagaaataaaactcaacaactagatcatactcataaaatcaaacaagtaagaaaagatattgccagaattttaacagcaattagacaatcagaattagaacaagaaaaaggtagaaaataatgtctcattttaatcataaatctcataaagatgcaagtcaaaaaagacaaaatacacgtaaaactttaactggagttgtagtttctgataaaaatgaaaaaacaataattgttgctgttgaaacttatgttaaacaccgtttatatcaaaaaagattcaaaaaagttaaaaaattcgcaactcatgatgaagaacaaaaagcaaaagttggagatgtagttagaattgctgaaactcgtccatattccaaaactaaatcttttagattaataactattacatcttctaaaggagataaataatgttacaagaacaatcaagattacaagttgcagataattcaggtgcaaaagaagttggtttaattagaaacttaggtggttctgttaagaaaaattctaatattggtgatgttattgtgtgttctgtgaaaaaagcgattccaggaggaattgttaaagaaggccaagtagttaaagctgttattgttcgttcagtttatggaattaatagaagaaatggatcacgtattagatttgatgacaacgctgttgttatcattaaagaagatggaacacctagaggaacaagggtgtttggtccaattgctagagaaatcagagataatcaaaaatttgcaaaaatcgtttcattagcacctgaagttttataaaaacttgtttgctaaaatcatttgcaaaacaaaacaaattaatacattcttaaatttttacaaaggaaaatgatgaaaattagaaaaaacgatgaagttttagttatctcaggtgatgataaaggaaaaacaggtaaagtattatccgtaaacgcaaaaaaacaaacagtggtagtaaaagatattaataaagtcacaaaacataaaaaaccaaatcaacaaaacaccgaaggttctatttcaatttatgagggaccaattcatgtttctaaagtagcgattgtaactaaaaaagcatctaaagacaaaccagcagaaaaatccaaaatcggctacatttttaaagacaataaaaaacttcgtatagcaaaaactacaaagaaggtaatttaatatgaacgctttagtacaacactataattcaaaagtaaaagctgcattaaaagaaaaatttaactattcttcagatatgcaaattccaagaattgaaaaaatagttttaaatatgacagctggtaaagaagttactaactcaaaagctatcgaagaagttatgaatgaaatgtctttaatttcagcacaaaaaccatatcaaacagttgcaaaaaaatcattagcttcttgaaaattacgtcaaggaatgccaattggagcaaaagtaacactaagaagagacaatatgtgagactttttagcaaaacttattaatgtttccattccaagaattagagattttagaggagtaaatccaaaagcatttgatggtagagggaacttttctttaggtgttaaagaaatgattatcttcccagagattagttttgataaaatccgtaaattaaaaggtttagatgtaattattgtaaccacagctaaaactgataaagaagctcgagcattattagaactcttaggcataccatttgctaagaaagcataataaaacaaaaaggaaagtacatggcaaaaaaatcattaaaagtaaaagcagaaaagcatcctaaatttaaagtacgtgcttatacaagatgtcaattatgtggtcgtccacatgctgtattacgtaaatttaaaatttgtagaatttgcttccgtgaactagctcacaaaggacaaataccaggtattaagaaagcgagttgataatatgataatcacagatccaatagcagatatgatcacaagaattaaaaatgccttcacacgtaaacacaaaaatgttattattcctcattctaagaaaaaagaaagaatcttacaaatcttcttagatgaaggatatataaaaggatttactgtatctggtgaagttaaaaaagaaattaatgttgagcttaaatacaaaggaaatacaagttcaattgttggaattaaaagagtttccaagccttctttaagagtttattcttcagcttctgatttacctaaaattgtatcgggatatggaaccgttatagtttcaacatctaaaggattattaactgataaacaagcaagaaaggaaaatgtaggtggtgaaatcattgcttacatttgataattaatatgtctcgtgtcggaaatcgtgttttacaaataccagaaggtgttgaagtaaacattaacaattctttagtaactataaaaggtaaattaggaacattatcaagagaattttcatcatttatttcaattgaaaaagttgaaaacactctacttactaaaagaacatcagaagaaaaaaatattaaacaattacacggaactacaaattcattattacaaggtatgttaaccggagtttctaaaggattttctaaagaattagaaatcaaaggtgttggttacagagcaacattaaaagataagactttagaattattattaggatattcacatcctgttttggttgacttacctcaggatttaactttagaagtaccaaaacctacagttgttgtagtaaaaggaattgataaacaaagagttggtgaattagctgcacaaattagacaaaaaagaaaaccaaatccatattctggaaaaggtgttgcatacaaagatgaagttattagaagaaaagaagggaaaaaagcttctaaataaagctaaataattatggcaaaacaaacaagaaatcaagctagaattgttaaacataaaagaattttaaataaactaacttctaatttaacaaccaatcaaaaactcagaattggtgtttataaatcattgaatcatttttacgcatatgtttttgatcctgtatctgcaaaaactttaacttcagcaactacacttaaaaaagagtcaaaaaccaaaggtggaaatattcaagcagcacaatcacttgctcctttatttgctaacaaacttaaagagttaaaattagatcaaaatgaatttatttttgatcgttcaggttatttatatcacggtagagtaaaagcttttgctgaagctttaagaaaacaaggaattaagttttaattatggaaaatcaaaaaaaagaagaacaagtagtaaaaacagaaaaaatgaaatctacacaaacagttgtagtttctaaagaatctgttgataaaaaacaagcttcagataaatcaaatgcttcaaaaaatgaagctaaaacctttaaacgtaaacctggatttgctaaaaaagataaaactcagtttcaatcagagtttgaagaaaaagttattgacatagctcgtgttacaacagtggttaaaggtggacgtcgtttctcattttcagcttatgcagtagttggaaataaaaaaggaaaagtaggatatggacacggaaaagcaaacgaagttcaagacgcaattaaaaaagcagttaaagatgcacaaaatcgtttaattactgtgccaattgttaacaaatcaactattccacatgaaatttcagaaaaattcttagcttcaaaagttttattaaaacctgctccaaaaggaaaaggaattattgcttctaatacagttcgtgctgttgttgaattagctggttatacagatatttatacaaaaacacacggatcaagaacaaaaatcaacacagtgcatgcaacaattaaagctctacaaaaattacgtacagtagaagatattgcttgagctagagatattgaagttgaaaaattaactcaaaattaataaattagtaataaggaaataaaatgtcaaaaatacaattacataatttaaaaccaactgaaaattctcgtccagataagcaccgtaaaggtagaggtcatgcagcaggtaaaggaaaacaagctggtaaagggcaatcaggacaaagaaaaagaggtaaagttcgtcttggatttgaaggggggcaaaacccttgatacagaagggtgccaaaaattggatttaacaatgtaaattcaattaaataccaaacaatttctttatcagatttagataaaaaattcacaaataatgaaacagtaactttcgaaaaattagttgttaaaagacttgtgagaagaaagtctttacctgttaagttattagcaaatggtaaattaactaaaaaattaataattgaagtaaacgcagctagcgcaaaagcttttgaatttgtaaaagctgcaggaggatcaatagaggttaaatagtgcttaaatttttaacaaaaattctcggaaaagtttttgaatacagtgcaaataaatatattaattttaagcatactttttctacattatgaaaagaaaaagtattacttaaaaagattttatttacacttttaatgctctcaatttttgttgttgcaggaacaattaccattccaggattaagacttgttaatgcaaacgctattgatcgaaattcatttttaggaattataaatattgtaggtggtggtggattattaaatttctccattgttgccttaggaattggaccatttattacagcttctttaataatgttaattgcgcaaactaagttagtaccaccaattcaccgacttagtcaatccggtcctcatggaagacaaaaaattaatattattacaagattactaacttttttaattgcagcaattcaagctattgttttagttagaactgtaattggcaatcaagcattacgttttgttgcccttgaaaatgattctagtttttatcaatattttataattccttttatattagttgcaggtagtttgtttgcgttgtttttaggtgaacaaattacaaacaaaggtgttggaaatggaacatctttaattattttttcaggtattgctgtaagattgccaagtcaatttaaagttgcttttgaatactttgttgattcttctaattcttcagcgattattaatgatatagttttatatttttcatatttattgggattttttgttttgattttaatagtagtttttgtttatttagcagaaagaaaaattccaattcagcaaaccggttcaggaatgtcaaaaaatattaaagaaatttccacattaccgctcaaactcaatcctgcagggattatgcctaatattttttcgttaatagtagtttctttaccttcattatttacaggttttttagatccaaacacatcagctactagacattgaattcaaactcatatgcaagtgaatcaaccaattgggttaactatttttattgttgttaatattatttttgcaattgtaatgggattacaacaatcaagagtggataaaattgcagaagattttgctaaaaattcaacttttattccaggaattagaccaggagaacaaacagaagattacttaattggagttgtttttagactatcaatttttagtgccttttacttaacgattttaggagtaattcaaccagttgagcaaatgctcggtatgccacaacaaattacatttggtggaacatcggtaattattttagtatcaacagcaattgaaactatgtcacaaattaaagcacgttacgatgctgaaaaaattattgtcaaaagaaaaagaattgataaatcttcaacattagcttcaaaaactactaaaaaactattaaacaataaagacttattatgataaaaaataacaaattaacaaataaagcattaaatttaatttttcttggctcaccaggatctggtaagggaacactagctggtattttaaaagaacaaaagcaaattttgcatttatcaacaggtgatttattccgagcaaaaatagcttcagatgaagaatttgctttaaaaatgaagcaaataattttacaaggactttatgttcctgatgaaataacaaataacattgtcttagattatctgcaaaatgctaacttagaaaacggcattattttagatggttatccaagaacaattactcaggcaaagtttttagaacaaaataattttaaaattgattttgttgtttatctacaaacttctgagaatattattttagagcgtttatcacttagaaaatattgtccaacttgtcaaagcacttatcatgataaattcaaaccagcaaaagaaggaaaatattgttttaaagacaatactgtagtgcaaagaagaaaagatgatgaaccagaagcaattaaaaaaagaattgcaatttatcaagaacaaacagcacctttaattaactattacgcaacacaaaatctcttaattgaatttgatgcaaatcaagatttaaacaagctaacagaagaagttattactactttatgaaaattataaaaaccgatcaagaagttcaaaaactaattaaagctggtcagctcctggcagaggtaaaacaaattatttatgaccttgtaagaccaggtgtttctttaaaagaattagatgccatcgcttttaaagagatcgaaaaaagaaatgctaaaccttcatttttaaactatcaaggttttccagcaacaatttgcgctagtgttaataatgtattaattcatggtataccaacggattatgtaattcaagaatctgatgttgtctccattgatttgggtcttgcttttgaaggatttcacgctgatagtgcctttacaaaagcagtaggtaaagtatcttatcaagatcaaaaaatcattgatgttgctgaaagtgcattttgagcaggattcaacgctattaaaaaagatgctacaactttagacattgctaatgcaatttttaaagtaatcaaacaaaataatttatacacgcctaaagaattttctggtcatggaataggtcgtacactacatgaagaaccatatgtttataattatccaaataaaaatgaagttattaaacttcaagataatatggtaatttgcattgaaccgatgattttacaaaattctgcaaaggtcaaaattttaaaagatggctgaacagtaattgcagcatctaataaaaacgcagctcattacgagcaaacggttttaattaaaaattcaaaaggaataatcctgacaggagaaataaaaaaatagatgtcaaaagaagataaaattattttcaaaggagtagtaactcaagtttttaacacccaagaatacgaagtagagtttgaaaatggacacaaagttatggctcacgttgctggaaaaatgaagctacatcgtattaaaataattgttggagatcatgtgcaagtagaactttctggatatgatcttagcaaaggtagaataatttatcgttataaataatttatcatttacataggagaaatatgaaagtaagagcaagtattaaaaagatttgcaatgactgtaaaattatcaaacgtaaaagtacaaatagagtaatttgtaaaagctcaccaaaacacaaacaaagacaaggataaaaagacaaggataaaaagacgaggataatgaaatatggcaagaatattaaatattgaaataccaaatgataagcgtattgttattgcactaacttacatttttggtattggaaaatcaagatcaaaagaaatattagcaaaatgtaacattaacgaaaatgttagaactaaagatctttcagaatcacaactacaagcaattagagaagtagcaaaagattatacaactgaaggtgatttacgtcgtgaagttcaattaaacatcaaaagaatgatagagattaaatcatacaaaggtatcagacacagaaaaggactcccagttagaggacaagttacacaaaaaaatgctcgtaccagaaaaggtcctagaaaaactgttatgggtaaaaaggataaataatttttaaaggattaaataatggcagttaaaaaagaaaaaccaaaaaaaattaagaaaaaaaatataacctctggtattgctcatattcattcaactcaccaaaatacaattgttacttttacagatcttaatggaaacgttattgcttgatcttcttcaggtgctattggttacaaaggaaccaagaaaaaaactccttatgcagcttctttagcagcagcagcagcaagtgaaggcgcaaaagaacacggaattaaagaagttaaagtagaattaaaaggtctaggacctggtaaagattcagcaagaaaacaaattgaagtttcaggaattagtgttattgaaattaaagatgtaactccaattcctcacaatggaacaagacctccaagaaaagtaattaaaagattaactaaaagatagaaagtaggtatttataatgaaaaaaagtgcaaaagtgtactacattgaaaataaagctgaacatctttctgattttgaaacaacatttgaattacaacctcttgaacgtggttttgctaacacattaggaaattcgctaagaagaacaattctatcatctgttccttcagtagcggtttttggtgttaaaattgagggtgtagaacacgaattttcagtaatagataaagttcgtgaagatgttgttacaattttaaataatcttaaaaaattacgttttagcttcaaaaaagaagtatttttacaaaatgaaattcaagtagcttcctttgatggaagaaaagttggaaaaattacaggagctgatattttagtaaattcagcacttgaaattgttaacaaagaccaagtcgttgcaaatacttccgaagttggagctttaaaatttgaaatgtttttaacttatggtcgtggttttgttgattttgaaacaaataaaagaaaaattcaagaacttggtcctgtattagaatctaaattaggttatggtcaaataatcgctgttgattctgacttttcagctgttgaaaatgttaaattttcatctactgaattaaactcttcaaatccaattgttgaagaaaaactaactttttcagttaaaactgatggaacaattttagccaaagatgcacttgctgaagctgctaaaattttaattgcacatttaaaattagttagtgatacagcaaatttagatgctgaagttgattcattttttgaagaagtaaaacaaaaagaagaagcaccgaagaaaaactcagcagatttaactacattggatctcacagttagatcattaaacgcgcttcgtagagcacaatattataaaatttctgatttattagaacttaccttagaagaacttgaaaacattaaaaatttaggtaaaaaatcagtagaagaaatagttgaaaaattaaaagaacataatttagaacttaaaaaaggagaataaaaatggcaaatccacatcaaatttatcgtcgtgatgcaacttgaagaaaacatgtacttcgttcattggctacccaagttattttacatggcaaaataacaacaacacttccaagagctaaagaattaagaaaacatgtagaaagattaattacaaaagctaaaaaagatacattagctgcaagaagattagttttagcttatgtacgtcacgaaaaaaccaaagatggtattgaaataatgccatatttattcaagaccattgcacctaaatataaagaccgtaatggaggttatacaagaattgttaaattacctcctcgtttaggtgataatgctaaaatggctgttattgaattggtataatttaaaataagttttttaataactaataaataataatactctataaaaaccactaaaatttagtggttttttctttatttttaaagctttttataagtttaatatattaattaaattctaatttttatcttgtaaatatttttgtatgttatttaaataattaaactctttttttaagttatctttttgttgctatatgtttttaaaaaaatgtctaatatttttaaagtctcatttttattactttgctcatttttttagatgatgatcatcatctaaagattagttccaaatcagattttttataaactgctaataaaaaatatcttttattcttgaaaataaaagttcttctccatcttcttggtttgtataataatcttttgcctcttttcattttttcaaacaaaattctaataagtttatatttagtattagctttttaaaaactgaattttttggtattttctacaaatgtaataattttttttgctttaataagcaatagtacttgcggatttttatatcaagatataatgcattgtttttatcaataacgatataacatcactatttaaagcatcatttatataagtaatatcagtatcagttaatttcttatttaagttcatagtgtttaaaaataccatataaagttataaattttattaacataattttgatttataagttctaaaatcaagttatatttagtatttttatcttgtaaataataacttttagaaaaattacaaactcaattttttcatatttatttaataatctaagaatatatcttgaagaaaaatcatcaatttgtgtatgtggctctcattttctatattcttttatttctgaacttttggcttcatttatgaaggattttcacaaaactttttaagttccctttgtagttctactttaatatcattaaaaatttcaaataaaccaccttctcgattttgtgttttatcatacttttttaaaaatatatttttaaaagctacaatagcaaatgttttatcattatctaaatttaaagaatttttttaataaaatttgtatatatttttcactcattaaaaatactttttaatatcttaatatcactgatatagttgcaaactatatttaaaactttctcatatggtggataaacaaatttatacaaatttgaaacattacaatttcatctgcaattctctaactcattttttgaatcaggctatctgctattgtaataataggaacaataaaatcaaaaatttacttctattttctacattaaacaacttattattaagcatataaacaaattcaataacttcaaaattacgttttgtatctttaaatatattaaattttttaaatttgaaaattttagttattatttgcattagcttttaacttatttttgatcactttgtttgtaaatttactataaaatttaattctattaatttgattaaaatatttatattatcaaacctatataaatcttcaaaaactacaacattagcttttgaattaattaaaatataagcaaattctttaatatttttatctaatagacttttatcttctgtatttttatgtaaatccatttctagacgctttaagttgattttacttcttttatattttttatacctaaaaaatatatagaaaaatagatgatagaaaataaatcaactaacaaaaagaatatattaatttatctcatataggaaagatgcttttttttaaatccaataccaataataacaattatagaaataataaaaattgatagcagaaatataaaaaacatataaaccgataaagaaaaatgttttttaagtttaaagttagagagcggaattaggctattttataatttaactcaaaatttgaaattctattttgttgataaaatcactttcatttgttggttttttcatcactataaaatcccacatttacagatataattttatcttcaattttttcattttttacatatgtatttcaagtagttgtttttccagaaccataaacaccaatgattcctatattttttatatctttattttcttgtgataaagcaaatcaatatcttctttatatggtttgaagcttttgatttttaaattaattggatttaatttttgataagtttttgtctttgtattgtctacttttcttctttttttatatatatttcaaatttttatttctgttttttataatatagaacaaatttaataattattatatataattaaaataatttttataattgaaaaattgttattaacaaaaatattctcaaaataaggaaattatgaattctgatatgacaaaaagattagtgccaaaaataagatttaaaggtttttttgacacttgacaacagtgtaaggttagagagttgtttgaaatcaaaagagggagaactattttaaaaaaagaaatcgaagaaaatagaggtaaatttcctgtatattcttcacaaacagaaaataatggtgaattaggtaaaataaatacttttgactttgatggagaatatttatcttgaactactgacggttacgcaggagtaatattttatagaaacggtaaattttcactaaccattcattgtggattgttagaaaaaagaaaatcaaatattaattattattttgcatataattcaatttctttaatttctaaaaattatgtgaatattgcctgtgcaattcctaatcttggaagtgatgttatgtcaggtgtagaatttatgatttgctcttacaaagaacaagaaaaaattgcttcacttttcttcacgctggataaaatcataagtctttatgagagaaaaataagtttactggagaaaattgaaaaagcattgctagataatatgtttataaaggaaaacgaagaaaaaccaagcattagatttttaggttttaatagtgactgacaaagttgaacactagaagataaaggatatttatactctggtttaaattcgaaaactaaagtagattttacaaacggaaactcaaaatacattacttatttaaatgtttttaataactttaatattgatttaaaagaaaaatctttagtgtttataaaatctgatgaaaaacaaaacagtattgtaaaaggagatattttatttacaatgtcttcagaaacttatcaagaagttggaatgtcttctgctgtaacagaagaagtaaatgaaaaaatatatttaaattctttttgttttggttatagattaaataaagcagattttttatttccaaatttttcagcatttttgttcagaaatcactcagtaagacacaaaatcattctccaaagcaatggaggaacttccagatttaatttatcaaaaaaatcatttttaaacttaaaaataaaaagtcctcaaatccaagaacaacaacaaatttcttcacttttagacaaagttcatttaactcacgcacaactaaagcgtaagttaaatttaataaaaaacatacaaaaatcggtcttaaataagatgtttgtgtaaaaaaatatgatttttcttcaaaaagtactaaattttaaagaaaaaagcccattttttgggcttttttgcttacgctttagttgtgcgtgagtagaatcaatatttgaaaataaatctgcaattttgttttgttcttgtttattttttacaaaagtaatttccaatttgttcatcattgaacctgtgaaatgaggaatagtttctccgatattttcttgatttaaattcattagttttaatacataaaataaaaatttggtgtttatatttttatttgaattaggtgctaaaactccagatgaactgacattaaattttccatttctataaaatacagttcctgcatttaccccatccatagttcatgtaatgtattctccatcataatcatatgttgaaatatttccactaattccttcattttgtgtttgagaagaatatactgggaatttaccaacattttgttgtatgtaattgatagtatatttagaatttcctctgttgattttacataaatcagaaatattatttttttctcaaaattcaaaaaaacttttaaatcttattaaaggtttattatttgcatttaaaacaaaaatgttggaaaataaagctttttgaagcttttctagcaatctaatttttctctcgtaaagacttacgattttatccagtgtataaaaaagttgagaaatttttcgttgttcatttaagttattagaataagtcaaaaccgcttctttcatcatttcgacagtaaattgtggaatgttccctgcagtcattgatttttgaatatctgccatttgaaaaacaaataaaaaatatcgataattgtaaattatgtttcttttaaaaattaataaaccagaattagaaacactgaatttttcgtttctataaaacactacaccagcataacctctggtggttcaagttaaacattctaaatcatatttatatgaacttatataacccattgttccattattggtggtttgcgatgaataaacaggatacttgccaggattattttgaatttcatatttagaaacaaatcctcctccatctaattcaaacaactctccaaccttacactgttgtcaagtgagtgtaaaagaatctttttatttcttaaaaaaaaaaaaaaaaaaaagaaagaaagaaagaaaaataaaattttcttatatgaaagaaaggaaaaataatatatgaaaatttcattatatgataataaattatctaatttttttatttcacttttagataaagtagataatttggaaaatattgttctcaaagataatattgataagataaaacaaaaaattttaaaaatcactttaacattttttgtacaaaaatatataatgaaaattttatagaaagatatttatgagcattttaaaaattttatcatttgataaaaccaaaaatatttttatctttgtgctacaaaatatctttgtagcatttttatcattaaatttatattcatacaaatatattgttgattattttttaaatgaaattaaatttgatgagtttttaatttgattattaatttgtttattttcacttgttttatctataataattcagtggattttaactgcttttaagatatctgttactagaaaaacatataaattacttcaagaaaaaataatagataatttatctaatcagagtttttctcaaattagcaaacaaagaaataaaaccgttgcattgtttaatgaatacttagattcaacaatgcttcttttggagattttccatgattatttatttaaatttatttcttcgtttacaataccattagtttttatatttgttttaagtcaataatcttgaataatgtttttaacaataattttttcacagtttttaattcttgccttttttataataattattccaagatttcaatataaattccaaatattaatgcaaaaatatgaagaatatgctcaaaaacaggttaaaactttttcattattttctatattttacttctttaataaagttaatatttttaataatttaatatttaaaaaactgaaaatatatatgcaaataaatttaaatttaatctaaaaacagattgagcaaattcatttggaaattttatttcagttttatttgttggaattagtatagttgaaattgctttactaatttataataatttcataggaaaatcaagctttattcttttgctttcttatttaataattattagtttttcttttactcttttatttaattcaatttttcctttaatgacatatggtccaacattgaaaaaaatattagaaacacacgaacaaccaagttttaaagttgaaaacatagataaaattaagtcaataaaattaaataatttatcatataaaagtaatgaaaatgacttcatttttcaaaatttaaatcttgaaattatgcaaaataaaaaatatgcaatagttggagcttcaggaagtggagaatcaacacttttaaagttaatagctaatttagaaacaaattacgaaggtacaattttgataaataatgaagttgatacaaaagaattaaatcctaaaaatacattaaaaaacattggattaattgacaatcaaaacacaatttttaatgatattttattgaataacatagttatgtgagatgacaatccagacctagaaagagtggaatcactaatagatgaatttaaaattaaaaaattatcacttgatactgaagtaacttctgattctttatctgaaggagaaaaacaaagaataattttagctagattaaaatatggaaactttgatatttggtgtttagacgaagcgctagataatatagaaaaagagtttagtaatcttatttgatctaacattttaaatcaacaagataaaacaattattgctattagtcatcattttaatgaacaaatattagagcaatttggtgaggtaattaggctataaaaagaaggaaaaatgagtacaaaatcaaaattatttttatttaatatttgaaatattttttatgttttacaatatttaattacatcttttgttattacagttgctccttactatttgtttacatttctagaagaacataaatatcaaaaacttgttattacttcacttattctaattctatcttttatagtttctgctgtttttacaggttatcataatgctgtttttacaggttttataaatattttaaaactcaaacttgtttctaaaacaattaaggtttttgataaggttaatttaagtgaatataacaaaaattctgaaggttattattattcacaaattaaaaacaacattggagaaagaattgaaaaatattatttagcattaattgaaattttaaaaaatcttttatatataattgcaattttaatttttgcgttttataccaagtgaattcttggagttactatagtagctttgttagtattattttttaatttttctttatttataaagccaaaattaaaaaaaaaaaaaaaaaaaacatttattgcaaaaacagaatcttgaaataaatttaatgaaaatataacaggtatcatttcttatttaccaacgttgtatactctaaataaaaaagaaaaacttaataaattatttgcaaaaaactagatgcaaatttaaatgtttacaataattatttaaaaacttctaagtttttttctttaatttcagaaaatttaaatttagtttttaaactttttgtaagtggtgtgataatagtttattttggtttagttcataaaaatgatgtatttgagttgattaaatcagtttcaattattgcatttgttggttctttgttagataacttttttgatcatctaaatgaaacaattgaagatattttaaaatttcttcaagtaaaaaaggccaaaaaagaaattcaagatacacaaaatattgcaccatttaatttaacacttacagtaagtgcatttaacttagaaaatgaagtattttcaagcattttaattaaaaatctctctttaaaattaaaggataaaacattgtataacaataaaaatttaattatatatccagctaaaaaatacattataaaaggttcaaatggttcaggtaagtttacgcttaccagaattcttttaggtcttgagaaaaactatgatggaaatattttactaaatgctaaatatgaagttaaagagattgattttaaatgaataaacaaacactttaactatctagcaaataactcgcttttacttgaagcaaatatagaaaataatattgttttatttgaagaaaattctgataaaaacaagctaaataacctaattgaaaaattaaatttgcaaacaatagataaaaataaaatcttaggacaagaagatgataatgatgtctcaactggtcaaatgcaaagaatagcgttagcaagaaatttatattttaaaaaagatgtgttaataatagatgaaggattatctaacattgataaagaaaatttggaaattgctctaaatttattattaaatgattaagaccttacattaatttatatttcacatcataatgacaacaaaagagaacaagcatttgattatataatttatttagataaataaaaacttactatttttagtaagtttttttaatattaacaaattttattgatttacaatatcaaattcttttggtagttttgaattaaattttaaagttttaccatcaatatttataaattcaatttcataagcatgaagtctttgattaaaatcatcaacttttttaccataaacaggatcgccataaacaggatgtttaatatacgctaaatgaactctgatttgatgtgttcgaccagtttctaattcacatcttacaaaggaaaacactttctttttataatgaaaatatttttcaacaaagacatgagtaatagcttctttggaattaaaatgagatacactcattttctttctgtttttttcatcacgagcaattggtaagttaatatgactgatttgattctctagttgaccttctataattgcgtaatattttcgcttgatttttctttcttttaattgctgagctaaaaaattatgcattttatcgtttttagcaaccaacataagaccagaggtatctttatcaagtcgatgaacaattccaggtcttagagaaccattgacatttgaaagctgagcaaatttgtaaactaaagcatttactaatgtattttcataatttccaggagctggatgaacaaccatatttgttggtttatcaactacgattacattttcatcttcaaaaacaattttaagttcaatatcttgtgcttttgcaatgatattctgttctttttcttgataatgaacttcaatttgacttccttgtttgagaataaaatttttcttatttacaatttgattatccactcaaacttgattgtttgcaataatttcttgaacaaaaacacgactaagttcgagtttttttcttaaaaaaatatctaatctagtttgctcatctgcgattaatttcatttttttcacaataaaaattataacaaaataagttattatgctttttcaagattttaaaaattcttcttgagttttattttaggaatataatttaagtacaaatataatcaaagaggttaaaaatatgtccgaagaatttttatatacatcaaaatgtaggtgtaaacaaaaaagatggcaaatgatatgtagaatcttcagatccagataatgaaactaaaatccaaattttaaaatctaattcaaagaaacaatctcatttttcaaagtaagattttgaatttgtaaaaaattctaaatttaaagttaaagagtctctttccaaagcaagaaacataatccctaaaactgaaaaattattatcagatattgaagaagatttagaagatttggaagaaacctttgaagagaatacagaaaaacaaacttctaaataataaaaataaaaatcacttaaattaagtgatttttatctataattttatataactttagctaagaatttttttctgcaagctttagataattcaagacaacttcattatcaaatatatacttactttttagattatctcttattagttcgtttatttgatctattaaaacgtcttttagtttatgagaatacttcatttttaaagaatttgtaaaaaattctaaaacatctaaaatttttattgttttttgcgggcaaatttttaaatccaaatcaaaatctatatattttactgtgttatcttctaaaataaatggcgatgctaagttgatataaatatttacctcatttgctttaaatcttactagtgcattataaaacttgtgttttggaaagattcataatgtaggttcttttacaactcaatgtgatttatcacttttaactttagaccattttaggttcaatatcaagtgttttgatgtattttgaacaattttagctgtatttcactgacaataaagtttgccattaaatttataagcttgcacattaattgtgctttgcttttctttatctttagacatcatacctattttttttactggtttttactaaagttgaattaatcaagttttaatcttgaataatttgcaattttatcactatttttttaattatgtattttttaaaaagttttttatttttgtattaatttaaaaatttatctataaacttattttaatataatgttttttagattaaattttttataaatttaaaaagaaagaaggtgttatgaaaattaattgaaaaactttttttctattttcaacatttgatattgtaattagtggttttttattagcaatattttcagcgttaacgtttattttaaaagtacatttaccttctaggtttaatgtagcttttgaaattcctttctatttatttttaggaattattttaggtacatttaaaggtgctgttgttgcttttatatttgatattatgaacgcattaattaaaggacaaattcatctttgagcatatgagtatggaattattcctcctcttattgctattattgcatcaggatttctctttttgttaaattctaaaagggatatttgacttcttcttccaacagtccttacttttatagttgcatctgtagttttaatttactacctcaaaatgcctgattcagaaattcaaagaacttctaaatcctgaaaagggatttttaataaacaattaattattggtcttttagctgtgatttattcatttgctttttttgttggtggaacattattgtttctatatcataaaacacataatagaaaatgaagattggcatttgtagtttttgttattttagtatttatttttgttgtctttagatatttttgacatccaattgcatttgttagatactacaatagatttttaaacagaacaggaaaagatagatatatttcacagtatttctttttttatttaactccaataattcttaaatctacaattacacttcctgtttatactttttgtttagtaaccttgactccattagttttagatttaaacaaaaaacataattttaaatccagactgggatggatgaaataaaagtctaaaatttttataacccattttttaaaatagtaaaatttatgtcttttttaaaaaagagtaaaattttattgtaaaaattaacttaataatgttttgtattttaaaatttttttacattttactttaatataattcaatttacatagaaagtatatatgaacaatttatcaactattttactcaacgcaaatttactaaataatttggattctttagattttaataaattaaacactagttataaagaaatgaatttagcagcaaaacaaaatgaacttgaaaaaattgacacaaatcaatgcacaataattatttataaaaaataattattataattaaattatggttgtctcttcatcaaatgttaattataatgtatcaaaaaatgaaaattttaagtttttaatttttcataattacccgctactatttcaaggttgaaaaattcatatagctcccagaataagggattactacaaagttataaaaattatttacacatattgtgtaaataattttttagaatttaagcatttaaaaaccataaattagccaagatttattcttcaaaaagtttagatttgcaaatgtacggtaaattaattacaatttatccaaaaaatgaagaagattttaaactacatatcgaaaatttgtatcaactattaaaaaaatataaaggcttaaatatttcagtagacaagcagtacaaaaattctattattttttatagatttggaacaaatcatagcaaaagaccatattttgttaatcccattactcagaaaaaaagaaccagatagaagtaaatcatatttttatttaccttcatttgtaaaggatgtttttgcagaaaaaccaaaagattcacctaaactttcacaatatagattaccctataacatatatcaaaatacttctggatttatttttttaggtgctaaacaaaatgaaaataaattactaacagttaaacaaactcacatttatacttattttgattcaaaagttgctttggtgagtttaagaaaacgtgaacaaaagttttgaaaaattattaatccatctatttttatagaatcattttttgaaaacaacttttttatactgtaaaagagtttataaatggtagagatttaggaaatgtattaaattctaatctaatttattcattaactaatcacgaacattattctaaatttttgtttaatttaattataaatttggtaaaaacaattgatttgcatcataaaaataacattattttaaaggatattaatttaggaaatttcattataacaaacaagaataaatttcactttatagattatgatttttcttttttcactaatgaagattttaaaaagaaatttgatttaaaaaataatgttattttagatacagatttattccaaattgataaatcaaataaattaactcattttcaaaaagattattttaagttagcaattgtactattacaacattttttttaatcatttttactttaaaaaagataaatatttattttctttggatttgttgttgttttgaaaatttacaaagttttttggtttaaaatcttatatttttcaatcacttaatttacttttatacaaaaatccagaaaaagttaattttgtacaaaaattagaaaaaattaaacaaaaatgctataaaaaagaagcatttttaatgttttcagaaaattatataatcaataaagtgcaaaatattttagctaaaaatccaaaaattaagtttaaattcgaaagttgaaaacataaattgattttttctgttattaatgatttagagtttgaaaatacagaaaacaaaaaagttcattataaaaatatctataaattaaaaatatcgagtttaattttttattgtttttatcttttgaatgattttaataaaaataaaaattcacaaaataaaaaaatgttgaaagaatgatagatccccttttctatttttctaaaaaaaggggatctgctcacaattttgttcatattttttttattatttatttaaaaaactatttgtttacaaaagttttaatttttttaataattgcttctttttcaaagccaatttgttttagtatatcttttactggagcagaaattccaaatgtatcaattcctatgtttaaactagcgtgttttgttcagccaaaagttgaagccaattcaatagaaaccgctttagaagcatctcaaataggtgtgttttgtcaattagataaagaaattaaattaaaatctaattcattagcaatttcttgtgcaatagctaattctgaaccagtagctataactgcaaatttagatttagattttcttacaaggtaagctccttttttaaattcttcttgatttgtgtttgctaaagaagtaatattttgtctagttaaaacaataacagttggtgttagtttagaatttattgcaatttcatatgaagcttttacttctttttcatcagcaggacgtaaaacatttaaattaggaacagatcttaacatagcaagttgttcaattggttcatgtgttggaccatcttcaccaacttgaactgaatcgtgagtaaagatataagttacaggaagctgcattaaagaagaaagtcttaatgctggttttaaataatcagcaaaaacaaagaaagtagaaacaaaaggcttaaagtgagagtgaagagcaagtccatttgcaattgctgccattgcaaactctctaactccaaatagaatatttcttccttttctattttttatagaaaaatctccatctgcaccttttgctttagttgagctacttaaatcagcactaccacctattcaagattcaagatttttgtttaaatgctctataacagcacctgaacttgctctagtagcaatgttttctttaatatcaatttcaattttttgctctttatcagaagctaaaattcaattttggagttctttggaaactttgaagctattaaaagcattttgagatcttttaatcaatgtatcttcatagaatttttttacttcttgaggtagttcgaattcatcataagttcaatttagattttgctttaaaacttcaatatctttacctaatggtgcaccgtgcacttctgaggtatttgcttttggagctccttcaccaattattgtttttacttcaataaatgaaggtaagttagattgttttgctttagtaattgcttgatcaatagcatcaacttcatttttttccacaaggatataattaaatcctaatgcagtcattttttcttttacatcttcagtaaaagttgcttctactcttgtatctaattgaatattatttgaatcatataaaacaattaatttgtttaatcttaagtgtccagctaatgaaaatgcttcatttgctacaccttcttgaatatcaccatctccacataaaacataagtgtagtgatcaatttctttaaattttacttctaaatgagcttgagcaattgcaactccagtagcgattgcaattccttgacctaatggtcctgttgttgcttctactccttttgtgtgtctgtattctggatgccctggagttttagagtttaattgacgaaattgttttaaatcttctttagagatcaatccaattactcttaatagtgaatataataaagcagatccgtgaccaactgataaaataaaacgatctctattaattcattgtggattttgtggatcaaaattcatatgtctagtaaataaagtatgaacaatattagcagcacttaaaacaattccaggatggcctgaatttgcttgattaatagcagcaactccgttcatttttaaagtattaattgctaattcttctatatttttatgcattttttctcatttctttgttaaatattaaataaatattttcaggctcagtattaattaataactttattgcctctcttgttttgcttaaaattttattaacagtagttgcatatttaaagttagctttggtgttgatataaagtttgagagtcaaatttgttgacttgaggttaatgttgacatctaaatgcttgattgtgaagctatctagtttgtttagcgcctttttaacttgtgaactaaaagcttttttatatactaaatattcttgatttaaagaataatttacaactacaaaattcattattaatctcctcttgaaacgtattttcctgtttcagtagatacaattattttttcgccttctttaataaatagaggaacatcgagttcatatccagtttcaacaatcactttttttgaaggattagaagaagtatttccttttacagcgtcataagctgttgttacaattaattcaacttttggttttagttcaatatctaatacttcatttttgtattttctaactaaaacttttgctccttcaactaaaaaatttacttctcattgaactttttcaatgtcaatactaatttgttcataatcagtatcattcattaaaactatgcttgttccgtcgttgtataaataagacattgttaatttttcaatatgagctttttcaactttggttccacctgaataggtttttaaagtaatagctcctgtttttaggtttttcacttttgttttgacattggcttgaccacgaccttgcttggaatgttgtgattcaatcacagcataaatttgcccgtcatctttaaaagtaatacctggtttaaattcgtttacgttaatcattgctttttccttttttagttaataaataagttctaaattgagttaattttactttatttttcttgcaaaatagaaaaaattcttttttattgaaaatttgaattactaataaaaaataaaaaaattaataaaaaatgcaaattttctaatttttattgtatacttaatgaaaaatgcaattaggacaaaaatatgaaaacttatagaaaatattcagacataccaaaacagtacagatttgatttagacttccttttagaaggtcgtactattgaagataaattagcaggtatggatgagtatatttcacaactaattgccaaaaaagatagtcaatttgatacagttgataattttttagcctatcaaaaactttcagaagaattcgcaatttataataataaaattttaaattacatttcaaataaactaaatacaaatttagttgatgcagaaactaataaactttttggtcaatacaagtttaaaatgagtaatttttattcatctttgggttcaattcaaaatcttttttttgctaagaaagatttaattaatcaatataaaaatgatccaagagttaaaaattacagattagaaattcaaaaatatcttgattttgaagcacatagattaagtgatgatgttgaagaatatttaactaaaacttcttttggtcaagtttctttaagttcaacttttgcagttttaaataattcagaaacaaagttcaaagatgtaatttctgcttcaaataagaagcattctttaacaattgctacactttcaacacttttgaaaaataaagatgaagatattagaaagcaagcttacaataattacttagatgcatatttaatgcataaagaaacttattcttctttattatatcaacacattaaaaaacaatccgtggatgctaaagctagaaactttaactctttaattgaatattgtttattttccgatcggattagtgtttctttgttagaaaatttatttaaaaatgtgcaaaatcatacaaatatttacaataaatttaaaaaagctcgtaacaaattttttaaatttaagtttaataagccaatgaaagattgagataataaagtttcgttggttaaaatcaaagaaaattatagcattgaagaagctcaaaacttagttcttgaatctttaaagcctttgggatcagaatacacagatatgattaaaaaggcttttaaagatcgttgagttgattacaacaatgttgccaataaaagaagcggagcttattcaattggtgcttcttatggtttagataaaaaatacattttaatgaattatgattttacttttaattcagtttctactttagctcatgaattaggacattcaatgcattcatatttttcagatacaagattgccttattcattagctagttatccaatttttttagctgaaattgcttcaatttttaatgaattaatgttagttgataaagcttttgaacaatcagaaaatgactttactaagtttaaattactagaagattcaattttagagttttatcaagtagtaattaaacaaacaaagtgggctgaatttgaatatgaaatgtacaatttaattgataaagggcaaccagttaattcttacacagaaatcgaaaaggtttacgttgatgtagtgaataaatatgaaatggaagctaacaaagtaaaattaggtgataaaagcaatatttactcagtaattgttcctcatttttattatggttattatgtatataaatatgctataggatatatcgttgctaatgtgttttttcaaaggtacaaaaaagaaggaaaagcacaattgcaaaattacattgataaattcttatcagctggaggatctaattgacctgctttagttttaaaagatgcaggaatagatttagaagattccaaaatttatcaacaagcttttagtatactagaagataacgttgaaaaatatataaaattaggtaataaactatttaaaaattagtaatttactttctattttagaaaataaatgaaaatttataattactaagaaaatatgctaataaaatctattagtgtgtttttttatatttttaaaaaaaggaaataaaatgcaaacaaaaaaaatagaattaaaattttcaaaaaaccaaaaaccaaaacaagaatttgccaacgcaagtgaaatttcatcaatgtcaaatattgaaattgataataatcaaattaacttaagtaaagcacacattagaaaaaggacgagtttttgagaagaattattttcaaaagattcggtgattttaaagtttttatgaaaattgttcaaaatagtgcttgaatttattgttgtagcttgaatagtaataactcttgtatttttcctgataaattccacaccaggtgaattaggaattttaacaggattatctgaagcgcaaaaaaaagctgaattagctaaatatgggcttgatttaccattgattcaaagatattttaattatttatgacactttattaatctagattttggaatttcattaactctaagacctagagtggatattaactcctttatttgacaaagatttttaacttcattttctgtaggaatcttttctgtgttcttaacaatagcaattggagtgcctttgggaatatttgtaggtaaaaatccaggaaagtttttagataatttctcaacagtagcaattgcagttttatcttcaataccttcacttgttttttctttaattctattaattatcggtaaagcaacaaaaataccttatgtatttgattttcaagattttgcaacgtatgttttaccagcaattgcgctatcgattggttcaattgtttcttatgttagatatattagatatgaattaaataatgaattaaactcaatgcatgctaaatttgcatatttaaagaatttaacaagaaatagatttgtttgaacacatgcacttaaagcttctttatttccaatagcaacatttttccctggtgttgttttgggttcgtttgtgggttctgtttttgttgaaaaaatcttcttaattgcagggtccgggggaattttaattgatgccatccaagcaaaagactttaatattattttatttttagtttcaatttattctttacttactattatttcctatacattaagagatataagttatgaattattagatccaagaatcagaagaaaggcaagataatgaccattacaaaaaacaattcaattagtcaatatttaaaagaagtatcagcaccaaatgcagttttacaaccattggcttatcaacaatgaaaattaatgtctaaagaggcagaagcttttgatagaaacttttttcaaccaaagcaaaatgcatttaaagactttatcaacagattttctcgttcatttgctggtgtttttggtgtaattatcatagcttttctaattttattggcaataattcttccttttactactggaaatccaattgaaactagacctaatcaaaaaaacttaaattactttactgaaaactttattttaggaactgataatttaggtcgtgatgtttgagcatttttatgacatggacttcgtttttctttagctcttagtattattgttgcaataattgaagttgctgttggaactttctttggagttttaatgggtcattttcgtatatttgacaaagtatttacctttgtaatcaaagtagtttctaacgtaccaacaattttaattctaattttaatgacacttgttttaaaaccttcattttgagtattagtttttgcttttaacattacaggatgaattggattagctaatcaagttagagctcaagttaaaagagctaaaaacttcacttgagtttcagcatctagagtgcttggaactccaaatagaaaaattctttttaacttcgtacctttaattattcctttattaattactaacgttgtttttgttataccaggaaccattttaggagaaactggattagcatttatagggctttcattgccaaatgtaccaactttaggtaatgcaattaatgatggaataccaattgtaacactatatcctagatatgttttaatcccagcatttttactaattttattaacatcagctgtgcaaatgataggaaatgcacttcaagattcattaaggagacaaagataatgcaacaattaagaactacaattgctatgaatcccaaagtgaatcaaattgaattaagacttgaaaagaaattagaaaaaaatgttgcagattttgcttcgaagttacaagctattcaaaattcagtagattcacaagaattaaaagataaaagaatcaaagctttaactgatgagtttaaatccagagaatttgctttgaaaaaacaagctcttaaagaaaaaagaagagccgaaacaccatttttacaaagagtacaaaagcgttttaaattagcatataatagacaacattttgattttgaatcttttgcaaaaaatgtccaatatcaaaatttttcctttggtaaaaagaaaatcgttgctgaaattgataatctaagattgtcctttagtaatccagcaattcataattatcgttctttagtaattagaaatacttcaattaaattttacgaaggtgaaattcatgcagttattggtgaatctggatctggaaaatcagttattacttcagcattgtatggtttaacaggaaataatgcaataatcgaagaaggatcaattaaattatttaacaatgaagtgcaagatttttcctttagagattgagagttgtctaattaccgtggaaaagtcatttcagctgtatttcaaaacccaatttccactttaaatccaactaaaaaagtcggaaaacaaattacagaaggaatgttaattaacggaattgttaagaccaaaaaagaagcaaaagcaaaagcaattgaatatttaaaactaacaaaaatcaacaatccagaacaagtaatggaactttatccacatgaattatctggaggaatgattcaacgtgttgttatctcagctattttatcacttgagcctaaaatcattgttatggatgaaccaacaacagctttagatactacagtgcaagctttggttttagatattgtaagagatttacaaaagaaattaaaaattacaattatcttcataacacatgatttaggagttgttgcttcacttgctacttatatttcaattatgtacgcaggtcaagttatagaagaaggaacaagagatgaaattctaaacaatccacaacatccatatacttgagggctaattttatctatgccagatttaaacaaaggaagtagactctcaacaattcgtggagttgtgccttcatcgttaaacgaaattgttggagatgcttttgcagttagaaatgattatgctcttgaacaagatttttatgtagaacctaatttctattacttatctgaaacacacagggtaaaatcagcactacttgatccaaaagcaccaaaagtaaatccacctgaattaattgctcaaaaacaagcacaatgagcaagaacacattcaagtaattcaactaatagctttaaaaatgaaggaagatatggaagataaattttacttagaacatcgaattaaaaaatatggaattctaaataaaacagtagcaagaagactaaccaaaggtactcaagctatgttagatgcatatccagaaaaagaacaattagttaaattcagaagtgtggatattacttacgggagtggtaaaaatacactaaaagcaatttctgatttaaatatgaatatttacaaaggagaaatcctctcactagttggtgaatcaggaagtgggaaatcaacaacaggttcagcactagctgctttgacttcacatagttttggttcaattactataggtagcgaaacattaccgcataaaacaacacaaattaattcaaaattaaataattatttagtagctaatgtacaaatgatttttcaagatccagttagttcactaaatcctcataaaaacattttcaaagtagtttcagaaggaattgataatttagagcttaaaaccaaaggtggcattaaaaaaatttttctccaaaattttgatgaaaatgtttttcgaaatttagttgatattctagcaaaagacaacaactgatcagaacatacaaaagagttatatctaaataagtttttccaattagaagaagaaaacaaagagttagcttacgattatctctatgttaaatttcttaatgaattagcagaacaaaacactcaaaaagctcaagcatatttacaacaatcacaagcaactagaaaggaaaaagaagcactttcaagcgcaaaactcaagtatgaattgattttagagatgctaaaatccgttggtctagacgaaagtgtactaaagcgttttcctttagaattttccggtggtcaacaacaaagaattggtatttcacgagctttagttttaagaccaaaattattaatcgctgatgagccaatttctgctcttgacgtttccattcaagcacaagttattaatatttttaaagatttaaaacaaaaatataatttaacaattttatttatttcccatgatttaagaatggttgagtacatctcggataggatagctgttattaacaaaggtaaattattagaaataggtccaaccaaagaaataatgcaaaattttctacatccttatactaaatcattaatggaagctattcccgcgattgattcaacatctaaatcactacttggttatgtatatgatccgcaaattcatgaatattcagaagataatcaaccagagtgagttaatttgggtaataatcacttcgttttagctacaaaagacgaagtttctcaatgaaaaaaaggagtttataaaacatgaaaaaattaacagcaggagctaagtttttaatagcaacgacttcagttgtagctgcatcaggagctgttattggtggaattaaattatacggagagcataatgaattaggtgtttatcacttgcaattagaacaaagtgattcaaatgcagtaacaaacctaactaaagtaagttctgcagattttcttgactctgtaggacaagttgtagcaaaattcgattctaacttagatccaaataatcctcaaaatgaaaattcaatggttattttacaacaaagagtaaatggtaaaatgactatgtcagttaaagattttcgtttatgatttttaaaaactcacaatcgccaaactcctatctttagagtaaaaatagggttgatgacatttattaatgaatattttgaagcattaagtcctcaagaatttgtggattatgcaaaatgatttattaaaaatgtttcctgaggaccagaaactctttcactttcttcatttacccttaaaaaaggagttatagtaaatggaaatgcaataactttggggcaacatcaaggaaaaagaaaagaagaaaccaatattactttttaccctgatgcattctttggttctcttcctttagcttctaattacgcaggaagaggaaatggacctgatagtttaacatatcaatttaattcacttgcttttacaaaagaacaattgcaagaatatatcaaaaccattccgcaaagattagtaatttctaactatccagataaattcacagctggtggtgttgttggtcttgatttattattaggtaaaaaaatccacagatatagtctttataatgctttaaaagcaacattggaaaaagcaaaacaaaatgcaacacaacaaagtcaacaacaaacaattaaagcacaacaacctgtgtttgaaaatggtttaaatgatccagatttagtttctataaaaaataccagagctgatggttctgttgaagtgataactcctactaaaaaagcaactggattaaacaaagacatttcatttaatgttgattacgatgcagagttaaaaaaacttgaagctcttaaattaaaaccagaagatacttatttttatgctttcagtgataaagacgaaccaagtgcaaaacatcagcaattagttgctaaatttacaacagctttatacatttttgcaaaaaatcacaatatatctttggccaataatcctgaagttgttcttgatacaacacaagtagataaagaatatacaattgaaaaattaatcaacaaacacagagatgctaattgagaacaatatcgtttatatccagatgatgtacctgaacaatatttagaaactgttgattttgtaatctcaaatccagattttgacactaaaaaagaaagagattcacaaaatcaaaaacaactaaaatttagttacaattttagaattaatcgtttagcaaatggaactaataaagatgaattaaattcattaatgcttcttgaatttattaaagaaacacaaccgcaattagaaaaattagcaactaacggatttagaaatttttataatttccaatctacaaaaggaaatacaatttacctttacgaagatggtaaaaaaactacatttcaccaaagtttagaatacgctgaagataattatggtgaagattttgattttaaaaaattaaaaaaagtttcaattttagatgttgttaaaaaagacaaagatcacttagaaattaaactaacagatgaagataaatataaaacatatttagaacaatttgcaaaagatacaacattttcaactaaattaacaccagttttaaaaacttttactgatttacaaaaaactccaaattcaaaacttcctaatttattaaatgctctttcatttgatgctaaaactcaaactttatcaataactgatccaagtttagtttcatttttacaaaaacatttaactaaattaaaagagttttacaccaaacataatcttacaaattcacaaaatatcgacgctttacttttacaattagaaaagctttgaaataaacaattagatgaagcagaacttaataacacctatttagattcaacagatgatggtgttacatctgttactgaacaaactttagaaactaatatttcttcatttgcttcttttgtggatgctgctttaaatttggttaatactttaaatgctaaaccagaagctaaagctaaatcagatgctgaatttacaattgtaaaagaaattaatcttgcaagcaacaatccagatttaaaacaagctgaagaagaatttagaacttttaaatgatcagttaattactttgatagagtaactccaagaataattaaagaaaatgatgaaattattgatttaaaacccacaaaaacttacacactatttcttgattattacgatggtttaattgatacagttttagaaaatgatccatacgttgcaactgaaattgacggcacacatttagaaaaatcaattaatccaacaacaggtgaaataacttattcaatagcggatggaaaatatactggattttattcaacagatcgtatttctttcatttcgttactaaaagctagttcagataagtttaaaactaccggaataaactatttaagatacgttggacaacacgaatatggtcatcaccaaacacttcaatatgcccaaaatatttctgaaaaatccaaagcaattcaagctgctgctttaacaagtggtggaattgcagctgaaggtttatataacaaagatatcttacaactttacctagatgcaagatcttctggtcttaaaataagaagtgcaaatgcaacatatgaaccatcagctaatggtttgtattctaactatacatttaacaaagcaaaaggtgacattccacaacgttgagaaacagaaaaagatatttttggatctcgtccaggagaacccactgaagatttaatcgataacaaagcaagaagatacttacaatcttttgaaaatttaaaaacagctgctgatttaagaaatcttaaattatatgatttatatttattaaacgcatttgattttgattcaggaacaattagtcctaaaatcgaaggaaattccgagtactttaaattaggtaatgaagttctttcacgtattgctaataaagactcttttgcacaaaatgcccaagttagcttgcatgatttagaactaactccacctgtttctaaagaaaaattagataaagaaaaatttgctacttttgtaagtgattttcttgataaagtattatctcaagcaaacaaaaaaaatcaagataaaacctttcatgtttcttttgatgatttaaaacaaatttttgaaaaagaatttaacattgtagcaagcgcaaaattggataataattttactgaagatcaagctaaatccatttatcgtgcaaaagtaaaaagagcacttgcagtgttttacaaatcaaatctttcttcatttaattcattaattgatgaacttgtacaagagtttcaacctgagttaaaaaaactagaagcagaacaaaaacaacaaaattctaatcaacaaaaccaagcaaataatcaaccaaataatcaagaacaattatctaaattagctttacaaaccaaacttattacttatcaatcactagtaaataatgctgaaaattttaaaaaattacttactttattagagcgacatcttgatgttaaatctcttagtgtggagcaaatctttgatcaagttaaaattgaaactttagatgatcttaataaatatggagttcaacagcttaaatctttattaaaaaaagccaaaaataaacaagcaggatttgaaaatgttactcaagaacaaatcgaatctttagaaaaaaatattgaattattatctcaacaatataaaactttaccttctggaacaggtaaaacaaaaattcctgaaggatttttccctcaagattgagtattacttcaattcaaatccattgtagatgttttacttttagcaataaacactgaagtaagtgatttacaagcacaaatagctcaacaaaatgaacaattaaaagcatcaaaagatcaaaatacaaacaaagctgctcaagacaaattagcacagttaaatcaaaaattagaaagttttttacaaaaacaaaaattatttaatgaaataaaagataatctctttggtgataacagtaatttagaagaattaagtaaagcgccggatagttatattttaggaagtgatattaataatctttacaacagatctttagtagatggtaaaggaaacatcattaaatttgatgacaaaggtcaaattattgcaggaacatatgaaacatatccttcagaatctgatccaaaaataatgaagtttaaaaactttaaaccaacattattttacaaaaatggaagacctttaattgatataaacacttttgatgatccaacatcttattcagaattaaaaaaagcaattgataaattaacaagttcatttaattccaaattaataaaaaaatatgaaaataatggatgagatacatcatcaagcatttccacatgaaactttaaaactagcgatggagttgctaattctaaaaatccagcaaatgcaagtaaatattgaacttttttaagccagtttttaaatggtaaccttagagaatttttctattcttatgacgattttaaagacacaaaagaaaaaaatttaacttttagtcttgatttaagcaaactcaataactcaactttagatttaactaaagaagttcaagatgtagtagaatcaagaatagcaggagtacgtaattcacaaaataaaactgttaaagatgaatatataaagctcatttattactattactataatctaagtggccaaattaatccaaaaactaatgttgaagttaattttgattcatttactaaagattacagaactaaattaggaaataattctaattattcatatccacaaagtgatcaaattgactttagaaataaagatgaaaaaggtaaagtatttgatttaaatgcttttaaactcaaatatggttactataatgatgaagcatttaataagttaactccagaacaaaaaaacttaataaaacaagatagtttttactcagatgcaaaagaaaaagatttatttgctaatcttagtgatttagtttcattaagaagttcttcattttacaaattaatgaatctaattttatttatagcacgtcaacaaagatcagttattgaatctaaagttatagacaacattaacagtaaattgaaaggtactcaatatggtgaacttaatacaagtttatcaatttatagaaacttcttagatttatcaagcatatttgacatagttgcagataaagttttagattctgtaaaaatccataacaatgctacaaataaagatttagataaaaaagatgttgaatttttccttaatttattaaaagaatatttcaaatattatagtttaggagaaagaagaagacagcaattactatcactaacaagtgcttctatgccaatggcaaaagtaattaaaataggagataatgagtattatcaaaatccaaaatatgattacttagtaaaattaaaatcttcaaatgccaaaattattttagatgctacttatactgcgcctagaacagaaacttcaagaacagaaatttccattcttaaatcttcattgtgacaattattaaatcttgattatgattttttagaaagccaattgaaaaagaaagatactgctacaggaaaacaagtcaccaaagatataactactaaattctttgggcaaaaaggtgaatttgcctttaaatctaaagtagaaaatggtaaaaccgttcttgataaatctaaaatttatctagataattgagataaagaagaattttttgacaaaaacttttttgttaaaaacaaagaaaatgaacaacaaacagtctttacaactttggcttcatttatagattttatttcaattgatgtttataaatttagaatagctcaagatgataatcaagaactatatcgtacttgagatgtagattatgcccttactaaatttgatttatacaactatattttagaacaagagaaaaaacctctatttaatggtgattttacaataaaaactaaagcagaattacttgcaaaattaaaattagttcttagtgataaaacagatgaagaacttgaagatatggtgcaaaatactgcaaatgaattaatggataaatttgaaaaatcttcatttaatttattaattaaaaataacaaattcacaaataaaaatattgatcaattattcttatctaatgtaggttatagtggatttaacactatagatttaagcagaggtgaagcacttgcatctaatggaatagatacaatgtataacgttgacccttctattttacaacttcaagaagcattagcaagccaaagtagaatcggaattgattacatttcacaaattgatactactaattctttaaatttagatactgcaagtattttaaaatctaatatagaaaaagatgacgcttcaaaatcaagaattaatagattattatcacgttatttaaaagataaaaatattgatatctccaatgctagattatttgaacttcaatatttaataggaaccaaagatttatttacatattcaaatttagcaactaaaaatcaatgatatagagaattagctgattcaacaagatatttcacaactgatctgaactttagctcaatagataaatttaattcatcaagatttgaaaatagagtaagcgatttcttctctgattatgtttataattatgcagaatcactaactagagatttagtacaaacaacttatcttccttcaactactacattaaataatatcccttcatatttaaatggattttctgaaaaaaatacaggttatgagttctttgttgatccaagtttttctaaaaaatgacttcaatcatatacaaatcctgtttctctatcacaaggaaaaggtttaggttatgattttacatctaatccatccattgctaacttttatgttcatatgtttgaatcagatttaaataaacaatatgcagatttagcaaaaatttacagagctgcagcacaagataaacaagtacttatagaagcagctatttcaaaaagacaatcagaacaaactcaagaacaaaaaaacaaattagaagcatttaaaaatgcaaaatgagataactacgaatgattagatgatgataaaaaagctaaaattttagatattaaaaaagaaattcaaaaacaaactcaagaaaccgatgaagaaatcagtaaaatagatgcaatagcttctgatcaagttaacaaatatattactccaacagtttcagcattagatagcctttgaaaaactttctatggaccctttgcacaagataatgcatatagtggagttgggccaaaagtaagactaaatagatcaactcaacaatatgtaagattagaaaactacattggatttactaattattcaaataatgggttcttcaaagatcgtttccaaagaaaagtacttgattgacaaatttatgatgaaaatcgtgaaagtattaaagatgacaacataagtattaaagatctcaaaggtaacaaagtaacagatagagcttctgctgtttgatactatacattagaatcacaaggtataggaagacaaacaatttcttcactttgaagagatcatttaagagatcaaattgcattttgaggatacaacactttagctgataatgacaagcttgaatacttagcttttgaagatccaactactggtcaaagatatttcttaaaagtacaaaaagaaaacacaaacaacattttctactttaaacgtcaagcagatgaatcttctaaatgaacattaaaagatgaaggatatgcttcttgagtaactaactgatccattttatctactttttctaatgctttaattaatccaggtgttaaaggcgaaaaaagattaagaattttctttgcagataaaaacaaaaatgagttaaaaggtttattacatttaccagcggatacaacttacttagcagaaaatggaaaaatttatacacaagctccagtttatatagaaaaaaccaaagataatcaatacttcataacaattaagagtcaatttagttaaaaaaaggaatcaatatgaaaaaatcaaacaaaattaaattattactatcatcttctttgcttttttcgcctttggtagctcttgcttgctctcctgctagtgaaactaataactttaactcttctgatgcaaagaaagaattagcatcttttggaatttctatacctcctattaacactttaaactatataaaatctaatgctacatttaaaataatgccatcattagttgaaggtttagtaaaaacagcaccagctgctaacaccgcaattggaaatattttaaaattaccaactattacttttgaaaactacaaaagtagtgttccaggaacagtgggttcaaaaattttaaaaaatagagacgctattactgatcaaggaagtagttatccaattgctaattttggagttaccacaggagttttagctccttctgggcaaaattccccttcatttattggaattcaaaactctgaaaataagtacgttacttttttatcacatttaaacaaaggtgcttctaaatgatcaaatggtgatccagtaaaagcacaagattttattgatactattttatacatcgtagataccaacacagcttcaactagattaaatgagctcttaaatatggatattaaaaatgtcagagcaatgagagatgtgcaaaatgattacttaaaacaatttggaattatttataaaaatccttttggtagaagaagattcataaaaaatgaagaaggacaaattgtcgaggatcaatcccaaccaatttttcaatctgaaaacaaaggtgatgaagaattagttaaaaaaatgcaaactattgcaagatcaataggtctttatacaggaagaattttcaatgaattctccaatcaagaaataagaacaattttaaaagacaataaagcattaaatccttcattttctgttaattcaacacaaatttcctttttaaatgataaaggccaacaagttacaaaaacactaactaaaaacccatttttagatccattacaagaatttgatggtccagaacttactccaaaatatgatgcttttgcagctgatgagtatgatttaagaattgaatttgaagattcagcaccaaagtcattaaccgatttatacgctagagtaataacttcttctttacttttaccaattaatagaaaatttgttgaatatgatttaaaaaacagagatgacttaggatcagaactttctaaatttctttgaaatggaccttttgatattaaagatttaaaactaggtccacaaggaaatatgcttttaactaaaagagtttcttattattcagctgataaaactgttcctgatgaagtcaaagtcttttttgctgatcaacctgaattagtatctaacttattctctgatggttatattgctttttcacaaatttcaccagtttttcaaaaaagattttgatctgagttagcaagtagaaaatacatggaaaaatcccaaggatatggaaccattgctctgcaatttaatttagatcattctaaaagaggaaatagttatttacaagatcctgatttaagaaaagctatctattacgctattaatcgtgaagctatgcttaaattatcacagttggattcttcatttggagttacaacttgaacagcttttggtcaagcaaaaacagaacgtggaattaatcttgaaacattttttgatggacaaacttttaaaactgaatacgttgaaaatggaaaacaaaaagaattcccaattcaatcactaccttttattgatcacttagctaaaagttataattttgaaaacgtctcacgtaaagatccttcatatgatgtaaaaacagctaatttttacttgaatagattcaaagcaaaacatccaaatttaaaacaaataaaactagaatttatttattcaggagctagtcaaaccggaattgcaattggaatccaagatcaaataaatcgagcatttaataaatttattgatgttgatatagttgctctgcctgaaaatatttacaaagaaagaataattagtggtgattttgatcttacaacacaaaactttgatacttttggttctacagcacaaggttatataactgcattttttacagctgatgaaattaacccagaagataataaattcaatggtttagtttacaatccttcttcttcatttacttatcaaaattgatgaatgtcacttactaaacaacaacaagaagaagtagtaaaacgtttagaaattgaaggtaaatttttatctaaattcaaagaattaattacaagaaaaatggaaatcgatccaaaaaccaaaaaagtaaaaactaaaccagtaattaaacaatacaaagattcaaaaccagtttatgcaacagatataaacggtaatgtaatcacaaatccaattttttcagaatctactactgattacaacgaaagagtcaatgccttttttaacggagtatttactcctgaagaaaaaagtgaaggttgaaactcaattgaagtctttaaattaattgctgtatttgaaaaaatattaagagaaagtgctccaattgtaccattgatggaagtagatacttactgaacaatttctcgactaagaggtgtcggaagtacatttaccttctcactccaatttgcttttgatattaataataatacaaaaggtttacctgtagaagcaaataattaagtataaaattcctcattaaaacaaaaactaatcaagaaaaattccttgattagtttttattatttagtaaaattttaaaaacaaaaagaaagagtaaattatgaaaacatataaaaaatatgaagacattcctttaaaatatcgttttgatttagaagatttactagaaaataaatcagttgaagaacatctcaagcaaatagatatttataaagaacaaatattagcaaaaaaagatactcaatttgattcagctaaaaactttttagaatacacaaaagtttttgaagatttttctatttttacaaacaaattacacaattatatttctaataaattaaataccaatttagttgatccgctttttaacaaatattttggtgaatttagttataaaatttcacaatttgaatcacaattaggttcggtggaaaatttattttttcaaaatattgacaaagttatgaattgaaaagataatgaagaagttaaaatttacaaaaagaaaattgattttttaattgaatctaaaaaacataaattagcagatgaagtagaagagtatttatctaaaacttcttttggaaacattgaattagattctactttttcaattttaaacaactctgaaactaaatttaaatcagtaaaaacaaggcaacaaaaatctcttccacttactatttcaacttatagcaaattgttaaaaaacaaagacgaatatgtcagagaacaagcttataaaaattatttacaaggatatttagttcacaaagaaacttattcttcacttttgtaccaacatgttaaaaaaatatctaccgaagctaaaattagaaattatccttcattagttgagtattgcatttatcctgataaaatttctaaatctttattagaaaaactttttaaaaatgtgcaagcaaatgcaaaaggagtaaataagttcagagctgcgaaaaaaagcttttttaaagctaaattcaacaaaaatttaaaaccttgagataatttggtaccattggtcaaaatcaaacaaaactacacagtaaaagaagcacaagattttgttttaaaagcaatttcacctttgggttctgagtataaaaaagtagttacagaagcctttgaaaaaagatgagttgattattacaatgtgaataacaaagtaagtggcgcttattcaattggtggaacatatggagtaaataaaaaatatattttaatgaactttgattttagttttaattcagtttcaacattagctcatgaattaggacattctatgcattcatattattctgataaatcactaccgtatgcccaagctagttatcctatctttttagctgaaatagcttcaatttttaacgaattgatgttaaatgattacgtaatttcaaatactaaagacaataaagttaaatttagtcttttagaagaagcaatttcagatttttaccaaacagtaattaaacaaactcaatgagcacaatttgaatacgaactttacaatctagtagatcaaggggttccaattaactcctatagtgaaatggaaaaagtttatgttaatgttttaaaccaatatgaaacaaataaacaaaaacacaaacttaatcaaccacaaaatatttattcagtaattgttcctcatttttattatggatattatgtttacaaatatgcaattggttttatcgtagctaatgtattttttcaaaaatataaagaacaaggaaccaaagctcttgaacaatatattgctaaattcttatcagctggaggatctaattgacctgcattgatcttaaaagacgcaggagtggatttagatgatgataagatttaccaacaagcttttgctgtttttaataaaaatattgaagaatatataaaattaggtaaaaaactatttacaagcaaataatttagaaaaacaaaagggtttccttttgtttttctattgcgtgaattgatttattaatattagttaattagtgttgaaatagaacgcattactatgtcgatatctttgctttctaattcattaattatatgtaaataaactctttctgttgtgttcatacttgcgtgacctaaacgtttagctaccgaagcaatagaaacaccagcgtagagtaaaatagaagcatgagtgtgtcttaatccatgtaaagaaatttgtgggatgttaactgaagaacattttttatgtagtatttcattaattgttgaattaaaaattttgtgattaaataaaaaaataggctgattttgtggtagattagcaactaaagttgaaaattgtgaacaagtttgtcaatcaagcggtatttttcttatagaagatttgtttttagttggaagaaaaccaccgtcttctttgtaatttcaagtttttgaaatgtttaaaatttgctttgtaaaatcaaaatcagcaggtgtaacggcaattgcttcagagtatctaagtcctgttttagcaattaataaaattaatcaatcataattaattgttgttcttaaatcaagagtttttaataacaattgtagttgaaataaacttaaaaacttcggcctttttttagctggtgttttgcctttgattacaacatttctagttggatcttttttaataaatccatcttcaaaagcatcgagtaaaactcttttaatatgatgatgaaaatcaagtgttgttgatttttcatgatcttttgcatacgtatttaaaatttcttgatatttgtatctatcaatttcttttagttttagatcaggagctaatttaagaattcaatccaatgtagtttgatatttttgaaagctaattgatcttatagaatcttttttatacaaatatattcagtttttaaaatattgatgaaatagtatatctaattttttcattttcctccgtatcaattcacacacaaaaacaaaatcaatgaagaaaatgaaggattttgagcaattcattatttaaaaaataaaaattactctcatatttttaagagagtaattttttgtattaatattgtttaattttgattactttttctgatttagcgattactttggatttaattttcctatatacatccgctaaatttaactcccgatttaattcttgttgatattgtaatcaatcgatttcttgatttaaaccataaacttttagaagatggtttccttgattatttgaaagtgatggaatatatgctaatccatatccatttaaaattgaatcaaatgcttttggatctaattgcgctgcttttgcaatattagccaaactaattgaagcaaaagaagtagaaatttttacattttctttagcttgtgaagaaacaatgagatcatttgcaaaatctgatgttttaattcctacttttactcatttaacaagtgagacgccaagagttgtattttcagctgtgctataaagtatgatgacatattctttaacatcattgagtttgtttcattttaacactaattcctcagcttgaaattgagcttctttagataaattcattacgttttttgtttctaataagtaggtatcatcaccaattttgctaaaggaatcagagaatatggcaaaatctattattttttcagtagcaaaaaagttttgctgatcttttgctaacggagcgtttaattgtttttggctaagatttaattgctctagatgataatcttgattcatttttgtttttgcacgatataaaaaggtagtaaaaccttgatcaattactttgttagcgattagatttaaaaaatcatcataaaataaatccatcttttttaattcaggatttgttaaaaaaatgtcttctacatttaaagcataaacacgtagttcatagttatgatcttgatcaggaggaaatggaccaaaataaacaccgtttggatggtcattataaagtgcttggagtaaatattttgttgctttatttgttaaactattttcaaattgaaaaattttatccctattttgaaatgaaaaatcccatcctagtttattggttttaatattagcagctactcagtgaataaaaataattcccatagctcctgttgcttctagatcaattaaagtaatagcgtatgacttagcccctttaactttgcttcattttaaaggaaaactaactgtatttttgtatttaccacctaaattagcatttccaaattctgtgtgtaacacaccatcttttacatctttaatttcgatttttatcatagctaaaattttaaaacaaaagtaaaaaaatgtttgaaaataaacaaaaaaccaatttatttttctaaactggcatttgtggtacataacttcatagacctcgttttgtacttatgagtttgctagtttattaaattcaattggctttttgtataataagtgttataaataaattaatggttttgttgttgtaggtgattagattttgaacttatgtgatttaaaaatcagctccaaagggatttgataaatcatcgccaccttgtgatgcttgtgcatcttgatcatcttcaaattctaagttattagagtgtttattaaatgtacgtggttcttcttggatcttatgatttatttgtgatgtaagagttaaatgtgattcatcacctgagatgattaaacctactttaatgttttcatctagttctggtgctaaataaataccacaagagtattcaaaattacgtgcacctttagattctagaaattgaacaattgtattgatgatttctcttttttcttctgaataagaatttttagctgaaattattataattacttgtttagttaatttaaaatcaaaatcaataactgaatcaatcaatgcttgttgagctgctcttttggccctttgaccattttgttttccaaatcctaagcctgaatttatgaacaattttttgtggtttctaattgcttttcttaagattgaaaaatcaatttctacaaaagcttgtttactaattaaatcaataatagtttgaataatatcaaaaataatttgattagcttttgtaaaagaatctgaaatacttatgccgttgtatagctccgcgattttagaattggaaactacaattagcgcgtctgaattttcttgtagttttttaattccttcagaagctcttgaaagccttttactatcttcaaaatcaaaaggttggatagcaatagctatagttaaagatttcagagttttggctacttttgcaaaaatatgtgaagctccagtccctgttgctccgcccataccggcaagaataaatagtagcttagtatctactaattgttttttaatatcttgctctgctaaaagagctgcccgctcagcttgaatcggatttaattcaaatcctgattctgagcttttgtcatctaataacatagtttgtgaaggattaaaaaatcttaacgtattatttcctgttttggtagttactaacaaataagaaatatcttgaagttgtctatgtttgagaaaatccactaagatgtttgccccacagccacctatagcgatgattttagctttgattacttcagagttttggttgttatttgacatttttccttctcatgttatcttttcaattaatttttatatagaaaattaaagtatttttaatttataagttttgtgagcactcttaatttagcactttttgcacgtttgttattatctatttctttttgatttgctcaagtagttttaactaaatattttgcttgggttgtttcaaaaaataaagtttggttttgcttgagtaattgtttaaaatagtttttaacaattttatcttctaaagaatgaaaagtaataattgctaatttgccatctttttttaagaatttatctattttggataaaaagatatttagtgattcaagttcttgattaacctcaattcgaattgcttgaaaaacatttttagcagggtttttctttctaagtacaaagttaggtaatgaatgtttaattatatctacaagttcagttgtataagtaataggtcttagttttacaatatcttcagcaatattatttgcaaaaggtacttgtccataatttgtgaatatattaactaatttttcttttgagtattcatttactaactcataagctgaaaagctttgagcttgattcattctcatatccaaacgagcttgtttgttgtatgaaaatcctctattggcttgatctaactgaggtgaagatactcctaaatcaagtaatacaccatctactttgttgatttgaagcttttttagttcttgatcaaaatctttaaaatcagatcaaataaattcaatatttgaagaaatttttaagagtttttcttttgtttgttcaattgcttgtttgtctttatcaaagactataagcttgccactagtaagtttttttaaaatttgagtcgaatgaccaccacgtcctaaagtaagatctaaatagataccatcttctttaatattaagctgatcaatcacttgatcaagcaaaacaggtatatgatccattaaagttcaactccagattctaatagttctttttcaagagtttcgatgttatcagcatcttggaattgactttgtagttgattgaatctatcttttggtcaaatttctaattttttccctactccaacaagtatgagctctttgttttgaatagcagagagttctagtagattctttggtaaaagtactcttccttgtttgtctggagaaacctgagttgtattagagaagaaaaatcttgcaaagttccgaatatttttgtttaatgagtttgcttgtgagattttgttcttaattttgtcaaattcttcggcagaacgtatttctagtacttgatctaagctaagactaatataaaatacattacctaattcttggcgataaatgctaggaattgctaatctatttttttcatctaatgttcttaaatttgtcccatacatatctactttttaccactattccccactattatatattaatttttaaaatacaaagattttttttaaattttttttaaaataaaaactcagatagtgagtatattaactaactttctgagtttttttatttacaatattattattattaatcttctaatttcaaatttctatttcaaagctttttgataatatcatctaaattatgatcttgatagataatttgataaagggataaagcaattggtaaatctaggttattggtttttgcaattttgattacattatcaagtgcaactaagccttcaactgttttacttgtctgtaaagctttttgtttatcttggataaattcatatccaaatgaataatttcttgataagtcagatagtgcagttacaattagatcaccaagacctgttagacccattaaagtggtatcttggccacctaagaatgagtttaattttcttgcttcagaaagcccacgtgctaaataagctgctactgtattaataccaaatccttttgaaaaaagcattcctgatccaatagctaaaatatttttatatgctgaaccaatttctgctcctatttcatcttctactaaataagtacgaaaataagaattagtaaatagtggttgtacttgtttggaaatattactatccttattaaccaaacaaacaagtgtatgagcttgttttataatttcttcagcatgtgatggtcctagcaaagaaactattccttttacatatttattatctttagcttcttgacgcattccttgttgtaaagataaaaaagtatttggataaaaaccttttgatgcattaatgatatacacttcattattagttaattgtaatatttgtttaaatacaacatctactacttttgaaggtaaagcaattacaatataagcaacattattaagtatttgttctaaattattacttgtattaaaatgtggaatttgtgtagaacttggaaaatattttaaattttttccttgtgagagttgttctaattcttcattatctattccataaattcaaatatttttaaatcctgaatcataaataactttggctgtggcagtagccatagctcctgaacctataatactaattttttgtaatttcataatttaaaattctaattgaaaaaagcttttaaaaaacaaaaaacccaacaaatattgggttttttgtttgtaatttctttttaagtagttttttgtgatcctgattctggagatttaggagttgcttcttgtgatcctgattctggagatttaggagctgcttcttgtgattctgattctggagatttaggagctgcttcttgtgattctgattctggagatttaggagttgcttcttgtgatcctgattctggagatttaggagctgcttcttgtgatcctgattctggagatttaggagctgcttcttgtgattctgattctggagatttaggagctgcttcttgtgattctgattctggagatttaggagctgcttcttgtgattctgattctggagatttaggagctgcttcttgtgattctgattctggagatttaggagctgcttcttgtgattctgattctggagatttaggagctgcttcttgtgattctgattctggagatttaggagttgcttcttgtgattctgattctggagatttaggagctgcttcttgtgattctgattctggagatttaggagctgcttcttgtgattctgattctggagatttaggagctgcttcttgtgattctgattctggagatttaggagctgcttcttgtgatcctgattctggagatttaggagttgcttcttgtgattctgattctggagatttaggagctgcttcttgtgattctgattctggagatttaggagttgcttcttgtgatcctgattctggagatttaggagctgcttcttgtgatcctgattctggagatttaggagttgcttcttgtgatcctgattctggagatttaggagcagtttctgtttgttcacctgttgttgttccagaaccactggttgttccagactgacctccgcttgtagatgttcctgatcctgaatgtccacctgttgttgttccagattgatctccacttgtagatgaaccagatcctggttgttgtgatttatctgtattagtttgtccacatgaaatagctattagaggtattgaagctagtgccacaagcgaaccaaaactaactaataatttctttgaaaatatcgattttttcacttttcctcaattctttattttcttaaataaattaataaataaaagcaaaaataaaagaggcaaatattatttgtgtgtgttgttatttgtgtaagaatcttgttgatttttacagcaaaattgtcccaagctttttttttttttttttgaaaatatgaaaaaattttacaaatttaatgttttttaaattaattagagaaaatttttcataaattcttattaaaacaaaattattttaaaaaatgagtattttttatttatttataaaataaatttaatatctgtttttaataaaaaaagccaacttttgttggcttttactaattttatgtttactttaaaatttaaataaataataggaactattatttggttgatccatttccagaatcttgtgaatctgatcctgttccttttgctccagaatcttgtgaatctgatcctgttccttttgctccagaatcttgtgaatctgatcctgttccttttgctccagaatcttgtgaatctgatcctgttccagtcttacctccagttgtagatgaacttgatcctgatcctgattgtccaccagtagtagttccagtctgacctccagttgtagatgaacttgatcctgatcctgattgtccaccagtagtagttccagtctgacctccagttgtagtacctgatcctaatccagttccggattgacctccgcttgtagatgaaccagatcctggttgttgtgatttatctgtattagtttgtccacatgaaatagctattagaggtattgaagctagtgccacaagcgaaccaaaactaactaataatttctttgaaaatatcgattttttcacttttcctcaattctttattttcttaaataaattaataaataaaagcaaaaataaaagaggtgtgcattatttgtgtgtgttgttatttgtgtaagaatctttgaagatttttacagcaaaattttcccaagcttttttttttttttttttttgaaaatatgaaaaaattttacaaatttaatatttttaaaataatttaagaaaatttttcacaaatttaatggaaaataaaaatattttgagttttaaaactttttaattaattgtgggtaaatcaatattattttttataaaaaaaactcaacaaggtgaggtgatacccttttcttgaaaaaatttttgagtgttttaattaattataatttgaaatgaatgtttcccaaaatttaatgggagacattcattttattttatctttaattcgtttgtaattgtaataataaatataatttgcaattgctttgtgaaattgtttaaaagttaaaaattctttttcgcgaccataaaaacattctctttttaatgtcccaaaaaatgattcaataacgctattatctaaacaatttccttttcgagacatggactgagttattcctttttgttttaatttttctgaaaattgtttatgttgatattgtcaaccttgatcactgcgaaaaattaaaccttcaagatttttgtgctttgaaaatgctctttgaagcatttttctaatttgctggttagcgcttgtagacaaatctcaagcaataacttcgccattaaacatatctaaaattggcgataaatatgcttttccaaatggtccgctaaattcagttacatctgtagttcatttttgatttggttgagtagcaacaaaatttctatttaaaatattgtctgcaattttgccaactgttcctttgtaagatttgtattttcttcttggacaaattgctttgagattgaatttttccattaatctgcgaacttttttaagtccaattttatagtctctattattaagttcagcttttattcttctttttccatatcttgctttattttcttcaaaaataagcttcatttggcttataatttcttcatttttcttgtcaaaatcttcttttttgagttcataataaaaagtagatataggaatagaaaactcttttaatacttgagttaattgcaggtttttatcagcttttactctattataaattttttttattttttcttgccttggttgatttgagtcaaagatctctaccaaggcttttcacttttttagaacttcattttccttttttaaaagtttattttcttctctaagaagtttaagttcttcatatacagataatgaagaatttgattgatcttgactatcggaattgtttgatacttttgtagatttattattattattattattattaatcttagatttcattattggtctttctttgtttaattctaaaccactaattcccgattctaaatattttttcgctcaaaaagatatttgacttggattaagattattttcaagtgaaattttaacaattggttcaccagctaaaaatcttttaactatgtttaatctttgatctatagttcactttttatttcgtggttttttcttaagaccttcaactcctaatttgtcataaattttttctcaaaaatttacttgatttaaaaaatttttttgacttgtattagcaaaatcaggctttttaatttcaattccttttttgtatttttttacacattctaatttaaattctaatgaatatttcataaaaaatccccttttctatttttctaggaaaaggggatctgctcaaaggttgagttttttatttttttatagttacacttaaattttaaatttaaataaataataggaactaagatgtgtgttgtgtgttttcagttttttctgaattcattcctgattcagaatttgatccactacctgtatttgtagttgttcctgcttgactacctgtagatgatccagaatttgattcactagttgttttgtttccagtgtttgttcctggagcttcactttgttgtgtgttttcagtttttgttcctggagcttcactttgttgtgtgttttcagttttttctgaattcattcctgattcagaatttgatccactacctgtatttgtagttgttcctgcttgactacctgtagatgatccagaatttgattcactagttgttttgtttccagtgtttgttcctggagcttcactttgttgtgtgttttcagtttttgttcctggagcttcactttgttgtgtgttttcagttttttctgaattcattcctgattcagaatttgatccactacctgtatttgtagttgttcctgcttgactacctgtagatgatccagaatttgattcactagttgttttgtttccagtgtttgttcctggagcttcactttgttgtgtgttttcagtttttgttcctggagcttcactttgttgtgtgttttcagttttttctgaattcattcctgattcagaatttgatccactacctgtatttgtagttgttcctgcttgactacctgtagatgatccagaatttgattcactagttgttttgtttccagtgtttgttcctggagcttcactttgttgtgtgttttcagttttttctgaattcattcctgattcagaatttgatccactacctgtatttgtagttgttcctgcttgactacctgtagatgatccagaatttgattcactagttgttttgtttccagtgtttgttcctggagcttcactttgttgtgtgttttcagttttttctgaattcattcctgattcagaatttgatccactacctgtatttgtagttgttcctgcttgactacctgtagatgatccagaatttgattcactagttgttttgtttccagtgtttgtttctgaattagaaccatttcctgaaccattagttgaacctgatgaatttgttccagcagttccatttgttgatcctgattgatttgttccaccagatgtgttagtagttcctgatcctggttgttgagattgggatgaattattatctgtttgtccacaagaaattgctattagcggtatcgcagccaaagccacaagcgaaccaaaactaactaataatttctttgaaaatatcgattttttcacttttcctcgattcattatttgatttattaaaaaaatagtctaattaataaataaaagaggtgattattatttgtgtgtattgttgtcatttgtaaaaatatttgaagatttttacagcaaaattgtcccaatcttttttttttttttttttggaaatatgaaaaaaatttacaaatttaatgttttttacaataatttgaaaaaaaatttcacaaacttaagtggaaacaaaactatatctaatttccaagaattatttttattttctaataaataaagatgaagatatatgtagatttttataaaaaaagccaacaaaagttggctttttactaattttatagttatttttaaatttaaataaataagaggaactattatttatttttgtttgtgttcttgatcttttgaggtttttgaactttctgttccactacttgtacttgatcctgaagctgaatctgcttgtccacttgattcggtagttgaaccagttccagttgtagaacttgttcctgaagttgaacctgtttgaccacttgattcggtagttgaaccagtttcagttgtagaacttgttcctgaagttgaatctgcttgtccacttgattcggtagttgaaccagttccagttgtagaacttgttcctgaagttgaacctgtttgaccacttgattcggtagttgaaccagtttcagttgtagaacttgttcctgaagttgaatctgcttgtccacttgattcggtagttgaaccagtttcagttgtagaacttgttcctgaagttgaatctgcttgtccacttgattcggtagttgaaccagtttcagttgtagaacttgttcctgaagttgaatctgcttgtccacttgattcggtagttgaaccagtttcagttgtagaacttgttcctgaagttgaatctgcttgtccacttgattcggtagttgaaccagtttcagttgtagaacttgttcctgaagttgaatctgcttgtccacttgattcggtagttgaaccagtttcagttgtagaacttgttcctgaagttgaatctgcttgtccacttgattcggtagttgaaccagtttcagttgtagaacttgttcctgaagttgaatctgcttgtccacttgattcggtagttgaaccagtttcagttgtagaacttgttcctgaagttgaatctgcttgtccacttgattcggtagttgaaccagtttcagttgtagaacttgttcctgaagttgaatctgcttgtccacttgattcggtagttgaaccagtttcagttgtagaacttgttcctgaagttgaatctgcttgtccacttgattcggtagttgaaccagtttcagttgtagaacttgttcctgaagttgaatctgtttgaccacctgtttcagtggtagaaccagatcctggttgttgtgattgggatggtttattagtagtttgaccacatgaaatagctattagaggtattgctgttaaagcaacaggcgaaccaaaacttactaataatttctttgaaaatatcgattttttcacttttcctcgattcattatttaactgattaattaataaaataaaagaggtaaatattatttgtgtgtattgttgtcatttgtaagaatctttgaagatttttacagcaaaattttcccaagcttttttttttttttttttttgaaaatatgaaaaaattttgcaaatttaatctttttagaataatttaagaatttttttcataaatttaattgaaaatgaaaagaacatctaattcttaaataatgatttttaataaaaaaactcaacctttgtgagcagatccccttttcctagaaaaatagaaaagggattttttatgaaatattcattagaatttaaattagaatgtgtaaaaaaatacaaaaaaggaattgaaattaaaaagcctgattttgctaatacaagtcaaaaaaattttttaaatcaagtaaatttttgagaaaaaatttatgacaaattaggagttgaaggtcttaagaaaaaaccacgaaataaaaagtgaactatagatcaaagattaaacatagttaaaagatttttagctggtgaaccaattgttaaaatttcacttgaaaataatcttaatccaagtctaatatctttttgagcgaaaaaatatttagaatcaggaattaatggtttagaattaaacaaaggaagaccaataatgaaatctaagattaataataataataaatctacaaaagtatcaaacaattccgatagtcaagatcaattaaattcttcattatttgtatatgaagaacttaaacttcttagagaagaaattaaacttttaaaaaaagaaaatgaagttctaaaaaagtgaaaagccttggtagagatctttgactcaaatcaaccaaggcaagaaaaaataaaaaatttataatagagtaaaagctgataaaaacttgcaattaactcaagtattaaaagagttttctattcctatatctactttttattatgaactcaaaaaagaagattttgacaagaaaaatgaagaaattataagccaaatgaagtttatttttgaagaaaataaagcaagatatggaaaaagaaaaataaaagctgaacttaataatagtggctataaaattggatttaaaaaagttcgcagattaatggaaaaattcaatctcaaagcaatttgttctaaaagaaaatacaaatcttacaaaggaactgttggcaaaattgcagacaatattttaaatagaaattttgttgctactcaaccaaatcaaaaatgaactacagatgtaactgaatttagcggtccatttggaaaagcatatttatcaccgattttagatatgtttaatggtgaagtcattgcttgagatttgtctacaagcgctaacaaccaacaaattagaaaaatgcttcaaagagcttttttcaaacacaaaaatcttgaaggtttaatttttcacagtgatcaaggttgacaatataaacatagacaattttcagaaaacttaaaacaaaaaggaataattcagtccatgtctcgaaaaggaaattgtttagataatagcatcattgaatcattttttgggacattaaaaagagaatgtttttatggtcgcgaaaaagaatttttaacctttaaacaatttcacaaagcaattgcaaattatatttattattacaattacaaacgaattaaagataaaataaaatgaatgtctcccattaaatttagggaaacattcatttcaaattataattaattaaaacactcaaaaattttttcaagaaaagggtatcacctcatttttttttttttttttgcaaatatgaaaaaattttacaaatttaatattttttataataatttaagaaatatttttataaatttaatggaaaattaaaaaacagcatctcaaacagatactgttttttaatattattattgattttttaatttaaataagaatagttgttattttgagact

SEQ ID NO: 2 - DNA, 923061 bp, Mycoplasma sp.
  source 1..923061: mol_type = genomic DNA
tttgtaattataatttaaatatatgaaaaataatgataatcaaatttttttagaaactataaacagtaaaaacacaactcttttattaattaattattttgaaacttctgttgatgatcagattatttttaacagtttttttaggcaaatcaaggttttagcagaaaataatgtagaaataattttaaaagttgaaaataattttattaaaaaagaaatcgaagaaaaatgaatgcatttaattgaaagagcagtgtttgaggttactggaattaagaaaataatttctttaaccatttctgataatttagaattaccaaaaccttctgaaaatgcaaaagtttctaaaatcgaagattattctcttgaaatagcacaaaagtcttcagaaaataaagaaaaaattaaatttaacaacattttaactaataagtataattttggaaatttcgttcttaccaactttaacaaaaacataatcaaagcttacgaaaatattataaatgccgaaagcattatttattcacctttgtttttatacggttcttccggaataggtaaaactcattttttacacgctataggaagtgaatttattaaaagaaaaaaaactgtttattatattcactcaagtgcttttacaaccttaattacaaactgaatgattaagaaggaaaatatagatattaatcattttgttgagactgtttgtttagcagatgttttgttatttgatgagatacaattacttgccaataaaacttcaacaatgagtgttttacttcaaattgtgaacaattttatagaaaatgacaagcaaattatcattacttcagacaagtcaccagatgttttaggaggttttgaagaaagatttattacacgctttaattctggtttaattttagaattttctaaaccaactaaagaagattttttaaagcttttgaaatacaaattagaaattcaaggtataaatcctgaaagttttcagaaagatgctttagaatttttggtttacaataaaaaatcagttagagaaattgaaggagtagttaatagaattaagttcttttcagaaggtgaaaatattactgattttaatttagaattaatcgaaagaatttttaaaggtattataaaaaataaagaaaacttaactcataataaaataatcgaagaagttgctaactactataacatagataaagaagatattactggtactacaagaaaaaaagaagtggttattgcaagagatatttctatttgatttgttaaaaacttgttagatctaacattaaagagcattggtcaaattttcggagacaaagatcattcaacaattattgcagttgttaacaaaattaatgttaaaaaagagaaagatccaacagttaaatatgcgattgagaaaataaatgaaaaaattagtaagtttttataacattaaattttaaaattgttaattattaaaagctttaaaaatccttcatttttcttcttattttagagtttttaacattttaacatctttattattgttgtttttaaataatgtaatataaaataaataattaattaaaggaaaatcatgaaatttataatcgaaaaaaataaaatagaaaaatttgttgatagaaatttaatggctgtttcaaattctagtgggtattctgctcttggtggattgttatttgaattaaatagagaagggcttttaataatttcaactgatcaagaattatcaattaaaagctttattgactactcagaatttatagaaatcaacagtttaggtcgtatccttgttaacgctcatatgttaaaaaatattttaaagaaattaaaaaacaatatttctttcgaagtagtagaaaacaatttgtttttaagatcaggattagatgaattttcattgaaattaaatgatgttaatgagtttcctgaaatagattttagaaatcaaggagataaattaacaatccaagcaaatcatttaagagaagcgataaaaaacactatttttgcttgttatcaatcaaaagaaactgcaagagaaaaaaattcatatattttatactcctgcttgaatttaagagctagagacggttatttagatgttatagcttcagatcgtattagaattgcttttgaaactgtgccaattgaaaaatttatagatttaaacatcgcggttaaaaataagaatctaaaagactttattttagaagaaataaaagaagaaattgatatttatgtaacaaattcaaaaattagttatacttatgataacacaacaattcaagcggtactttttgtagaagagtacaaaaatttaaaatctgtattcccaaaaagtgaagaacttgaacattattttcaaatagaaaagaaagagttgcttgaaattacttcaaaagcaactataatttctacttctgaaaaaaacaactcaattatttttaatgtatcaaaacaagaattatctgtaaaatttaacgaagatgaaaaaggtaattcaacaataaaaactaagaatttttcttaccaaggagacggttttgttttcaaagtaaattataaatatctaaaagatgcaattagtgtttttgaagataaaattaatttctttatttcaaaaaacaaaacaaaattacttataaattctcagtcaaacaaaaataataaacaaattatcggattgattcaaatttaaaacaaggaaataatgataatcagaattaaaggtgaaagtatcaagatgagtcaatttttaaaaaaaattgatattgttgattcaggtggtcaaagtaaatattttttattaaaaaatgaagtaaaagtcaatggagtagtaactaaagcgaagggaagaaatttgtatcctggcgacgtagttgaattattgaatagaatttttaaaatagaaaaagaagagaaagtatagaaaatgaagaaaaaacaacgatattttgatgcgatagttgtaggtggaggacatgcgggaattgaagcggtttacgccctttctaaagctcaaaatttaaatgttgcattagttactctaaataaaaataaattagcttctatgccttgtaatccttcgataggaggacctgctaaaggaataatcacaagagaaatcgatgctcttggaggtgtgcaaggttatttttctgatttagcaatgatacaagttaagtatctaaatgaatcaaaaggtccagcagttaaagctataagggcacaaatcgataaagaaaaatactctaaaattattcttaaagatataaagaaaaaagaaaatattactttaatagaagatttagttactgaactaaaaatcgaaaacaagagtgttgtaggaatttatttagagaagttaggtttaataaaaacaaaagctttgattattacaacaggaacttacttagattctaaaattttaagaggtgaagaagcttataaatcaggtcctgataatgaaagaacttcaaatttactttctgataatttaaaaaaattaggttttgaacttcaaagattaaaaactggaactccgccaagaatttattctgattcgattgatttttcacaagtggaaaaagaatttttacctttagtaaatattaatttttcttcaaaaacgaagaaaaatattaaaaaacaaatttcttgttacttaacttatacaaacgaagaaactcataaaataattaatgaaaatttaaatagatcttcaatgtattctggtgcaattaatggaattggtccaaggtattgcccttcaatagaggataaaattgtaagatttaacacaaaagaaagacaccaaattttcttcgaaccagaaacaaaaaaacaagacattatgtatatcaatggtatgtcaacttcgatgccagttgatgtacaagacaagttgattagaactattcctggacttaaaaatgcaaaagtagcgaaatggggttatgctattgaatatgacgcattaaatcctttagaattgaagagaagtttagaatctaaaagaatcaaaaacctttattttgctggtcaaattaacggaactagtggttacgaagaagcggcagctcaaggtctaatcgcaggtataaatgctaaagaaaagcttctaaaaagaagaccaattgagattttgagaaatgatggatatatcggagttttgattgatgatttagtaacaaaaggtactaaagaaccttacagaatgttaacttctagagctgaatacagattaattctaagaaatgataatgcagatattagaatggctaaatatgcaaaaaagactgagatgatttctaccgaagaatataatcaagttgttgaaaaatatagacaaatcgacaaaatgatagataaattatctaaagaatttatctctcctaaagacaaattgggtcaaaaatatcaagtaactgatggaacttctaaacttaaattaatttctagaccaaatgttgattataaagatgttttacctgattttgaatacgcttatgaactcacagttatagctagattagaaggttatataagaaaacaaaataatgatgctcaaaaaatgattagacttgagaaattaaaaataccttcaaatatcaagtatgagaaagtcaataatctctcttccgaagctttggataaattaataaaagtaagaccaaatacgataggacaagcatcaagaatttcgggtgttaatccagctgatattcaaatgttgttgttttatttaaaagttgaaaaagatagagaattacaggcaaaaaatataaattaattatgaagataacgttaattgattttaattcagatgaagaagatttgaaaaagatttactcaaaatttgtaaaacgaatagaattttttgcatcaattaattttgttatattaaaagaaaaacaagaaactaatataacaaaaaagaaagaattagaaactttagaaataataaaaaatattccgaaaaattcaaaagttgttcttttttctatacaatctaaacaattagactcaattgaattttcaaaaacaataacaaatgaagcaaatttaactctaattattggcgcttcaaatggtgttgatgaaaaacttttagaagaaaaaataaataatttagaaaaaataagtttttctaaattaacttttccacataaaatatttaaattattagtattagaacaaatttatagagcttttagtattaaaaataatcaaaaataccacaagtaaaggaagtatatgaaattaggtacatataaaaaaattgaaacagcaatagaggaacacaaaaatatttttatttttcatcacactagacctgatggagattgtctaggttcacaatttggattaggtttagcaattcgtaaaagatttaaaaataaaaaagttttctttattggagatgctacaggagttttagaatttatggattttaacttcataaatgaagacgaaataaaagaaaatgactttgaagactctttagcaattattgttgatacaacaggtccagaaagagtagaaaaaaactttttactagcagaaaacaaatttaaatgcacagctagaatagatcatcatcctcttgattcttcttttgaatttgatcatatttgagttgattcttcattttctgcagctgctgaaatgattggttattttttactaaaaaataaatgagaaattgatgaagaaattgcttcatatgtttatttaggaatatatacagattctaatagattcttctttccttcaactactgcaagaacttttgaggttgcttcatttttatttcatacaaattttgacttcaataaaattcacttagcactttcaaaaagagaagaaaatgaagtagcttttgttgctcatgtcctttcaaattataaaaaagaaggaaaagttatttactttcacgtcacacaaaaaataagagaaaaattcaacttaacaaaagaacaagcaacagcagtaaatattctttctaatataggtgataacagagtgtgaattttctttgtagatgaagaaaaaataataagagtaagactccgttcaaatggacctgtaattaatacattagcaaataaatatcagggaggcggtcaccaattagctgctggagcaaatttacatcacaaagaacaaattaaagaattagttgaagaagcagtgaaaatagtggaagaatttgaaactaatgaaaataggtagcaaaaagaagactcttgagttaattgaacagtttgattctattgttatttttcatcacattagaccggatggtgattgtctcggttcacaattcggattgcaagaactaatcaaattaaattatcctaataaacaagtttttgcagttggagattctaaaaattccttcaaattccttgatttacaacatgacagtattccttctaaagaaattttagaaaattcactagcaataatagtagatgcgaattttaaagaaagaattgagtttgcttatttgttaaatgactataaatttaaagctattttacgaattgatcaccatccaaatgaagatgatttaaatgcaacacatagatgagtggattcttcctatatcgctagtgcagaacaaattgcggatttagcaaaatatgcaaaatgacaagtaaatcaaagagcagctaatttaatttatttaggaatttacacagattcaggaagatttttattttcaaatacttcttctagaactttagaactaagtgcgatgttgtgaaaaaaaggtgctgacaaaaaattaattcatactaaattgagtgcaaaatcattaagtgaaattgaattcgaaacttatgtttattctaagattcaaaaaacaaaaaatgttatttattttgttttaaatcaagaagaattaaagaaattaaataaaacttcaaatagtgcttcaagacctaatcttatagcgaatattgatgaatataaaatttgaatttcctttgtacaagaagaaaatacaaattgaagagttgaatttaggtctaatggaccgatagttagaaatgtagctattaaatgaaatggtggaggacacgaactagcttcaggagcgattatttttgatgaagcaaacattaaaaaagttgtaaaagattgccaagaagaatatgaaaattgaaaggtcaataattaattttttaaatacttgctttagaaatatgagcaagtatttaaaaaattaataaattttagattatgaattctaaacaagattctgattattttataaaagaatactgaaattttattgaaaaactaaatcgaccaattttgccatttaacaaactagaaataaaaaaatatgtaaataattatcaaatctttcttaaaaataacttaattaaaatttggttttatcatcgacatcatattgacgaaattaatatttcaggagcgattttaaaaaataataaacaagcttataaagaaggaaaggcaatcttggttaattataaagaacatgctttcttacattatttaattgtttgtgcacaaacaacatcacctaattttggttttttatcaatgatagattttgaaacttgagatgaaattgcaagagaattttgtaaacaacataatataaaatatattgaaaactgaagaagttttttaaattaacttataacaaattattttattattttgtttttatattgaatttataaattaaaacaaaaacaaaaacaaaaaaaataaagtaaaaatccttttaatattaaataataaaaaatcaacacaaatttaaaattgtgttgattttttaaaaaatatctctttctattgtttattcttttctcactgtctgtattcaagttcattaatagatgaaacagtagattctatagattcaatataattaataatactttctttatgtttttttctaaaaaataaaggaaatcctcttgcatacaactcaagttctcctactgaatcacttaattgagtagtttcttgtcttattttttgaaacattgctaaatcatttattccaacgcttgtattaattaagtttaatgattcaactagttctgaaactctttgctcatttgtagcatcaaaagaatttaaaaatttttgtgaacgttctttattgatttttactctaatataagcaccaaaagcaagagcatctaaaattaatgcaattataagaaaggctactcaagtattacttcctcaatcctttgagacaccaacaaacaataaaattcacataagtaaagaaagaagaactgttgtaattcaaaaaataaaagtcttttcaacagttttgaattttttaacctcttctttcataacggataaaaaagaagagtaatcttgagtaattactttaaaattatcattcataatattttattttacttttttttttttttacaaagccaaaaagtaattttatacacagatataaaagaaaagagtaaaattaaactactatgaaaaacattaataaagaacttgatatagcaattttagggtcaggaccaggaggttattcactagctttaattcttgctaaaaataataaaaaagtagttatttttgagaaaaaagatttaggcggaacctgtgtaaatgaaggttgtatccctactaaaactttaataaaatctgcaagagtattagaagaagtttttaactcttctaagtttggaatccatgcaaaggaaaagcactttaattttaaacaaatacaagaaagaagaaaggaaaataaagaaaaattaaacaaagctatcttaaataatttaacaaatgcaggtgtagaaatagtatttggtgaggcaacaatagttgatgaaaatactgctgtagtaaatgaagaaaaatatagttttaatcaattagttttagctacaggttcttcatctagaaaaattaaaatagaaaatcaagaagttgtagaaaaagaaggaaatttactttattccacagaacttttaaatataaaaaaagtgccagaaaaattagttatagtaggtggaggtgcaatttccttagagtttgcatatttattttcaactttaggttctgaagtttcgattatagaaacaaaagaatttttaggtaatttcgattctaaaatacaaacaaatttaaaagaatattttcaacaaaaaggaattaaaattttcgaacactcaaaagtagttgaatttataagttcaaatacaattttgatagaaaatgaagaaaaaatcgaaatagatttttctaaagtattattagcagtgggtagagtagcgaatatagaatcttttactaatttgaacttagaattgaatcctaattcttctgtaaaagtagataaaacaagtaaaacttcattagacaatgtttatgccatcggagatgtaacaggttcaatgatgttatcatcaattgcatataaacaaggagatttagttgcgaaaaatattttaggttttgaaaatgaagaatttttagatatttcaacaacaccttgagctatttatttaaatcaagacatcgcaggtgtaggacaaactgataaacaactgcaaaatgcaggaattgaatttgaaacaatcgaaattccagcttcttcactaccaagagcacacgctgataatttagataagcagttttcatttttaagattacatttagaaaaacaaacaggaaaaattttaggttgttttatgtttttagaagatgcttccaatttaattaatattattgcattagcaattaaaaataatttaacaatcttagatttacaaaaatcaacttatacacatccgacattatctgaagcaatttattatgtttcaagaaatttcgtttttaaaaaataaaatttcaaataacacaaaataaaaaaataaaaaaatggctttatgccatttttttaaattaagcttttctgaattgtccgttaagttgttccaccataacacttgttgtttcttttaaagatttagcaaattctattgcttctttttgtgttgcgaaagttttggtaactttttcagcttgaggatttttaacggctcatgcattgttgtgtcttactacgtattttgtcatgatgtcctttatttttatatatattttaaaggaaaaattaattttttttattttttctttgataaataataatttaatttgtttttataatcttctaatttagatttttctaactctattttttcttttggtgcttttgctaagaaattaggattagacaagattgcttgagatctttgaacctcagattttaaaaatttaatttctttgtttatccttaattgttcttcgttttgtttagattcagaaagattcaagaagatttcgaaatgcgcagtttttaaactagaaaaattattttcgaaaatttcagcaattgctaatttgttaattaagtttatagaatcttgatctaaaaaattatttttaattcaatattgtaatttttctttcttagaaatattatgtttttcacgatattttctaagctctgaaataacttcaattactaaatcaatcttttctgtttctttataagttctaaaaattatttttttctgctctaaaagttcttcgttaaaaatttctttaaaaagataatcagttaagaaaggaataaaaggatgtaaaacaattaaagtttttttaagaacatttcttagatgataaccgtttgaatttaatttatttaattctatgtatcaagaagaaaaatgttcaaacacaaactcattaatagattttgaaattaaagaaaaattatattttgccatatgtttagaaatagttttatttaaaatagctaacttatttaaaattcaataatcacttgctgaatatggagtttttttgtaatccaaagacttaatatattttgaaatatttcacaatttgttatttaaacttcaagcagaatttaatttttcgatgttaaatctaatgtcttgtccgggggtagaattaaaaattaaagtagttcttaaaacatcggaaccatattgttcaattatttccataggatcgattccgttacctaatgatttagacatttttttaccattcatatctctgatgagtccatgaagtaaaacagctttaaaaggtttttgttttgtaatttctaagcctaaaaaatacattctagctactcaaaagaagataatatctcaacctgtaactaataaatttgtaggataaaattttttataaatatctaatttttgtggtcaacctaaaaaaacaaaaggagctaaacctgaagaaaatcaagtatctaaaacatcttcatcttgttttcagtcttttcccggagagtctttttgaattttaaactcttcatttttgtatcaaacaggaattctatgacctcatcaaagttgacgtgagattgttcaatcgtgaacattctccatccaagaaatcatagtttttctaaatttagaaggataaaaaagaactttgtcttttgaatttaaatggttaagcaaattttgtgctaatttcttcatagaaataaatcattgaggttgaacaaggatttcaacaacctcatcgcttctttgagaaaaaccaacgttagaaataatattttctgtttttaaaagaagacctttttgttttaaaaaatcagcaattaaatctctagcttcaattctatctttttgttcaaagccttttacttgattagttaattttccattgatatcaacacattcaaaagcagttaaattatgtttttgcataatatcaaaatcagccatactatgagaagaaactttcataactcctgaaccaaaattaatatctacatattcgtcagtgattataggaattaatttgtttgtgaaaggatgaacaacttgtttatttaagtattttaaatatcttttatccttaggatttatagctaaagcgacgtcacaagaaatagtttcaattcttgttgttgctacagttaaaaattcgtttgtaccttcgataaagtattttaaataatacattttttgttctacaggtttgttaattacttctatatttgaaagtgcagtttttaattttgcatctcaatttattgctctatttgctttataaatgaagccttttttatataaatcaataaaaacttttataactgcttcgtgtgcttgttcatctaaagtaaatctttctcttgagtagtcgaaagcaagtcctagtttgtaccattgttgtttgatattttcataatattcatcttttcattcaaaaactttttcgagaaatttttctctcccaagttcttcttttttgatgccttgtttatatagtttttcttcaacttttgcttgtgtagcaattcctgcgtgatctactgctggtacaaaaaaaacatcataacctttaagttttttaaatctaattatagtatcttgtaaataactatctcaagcatgaccaagatgtaattttccagtaacatttggaggaggtaaaatgattgaaaaaggtttttttgggtttttgttagcttcaaaatactttttatcaattcatttttgattaatgtctttttctacaattaagtgattatatttattttccattatcttcctttaaatttaaatctaatttaggtctttcaattttaatatcatttactacaaaatcattttctccaacaggataaattgcgttttccaatgtagtttcaagatgtaaaatctcttcttctttttctgacttaactttgtctgaccaatcttctcaaacatttttgatgttgttgaatccattaaattctacattttgataataaaactcattatatttttttgtgggtagttcttttaataaatccaaatcaaagttatgatgtttaaagaaataattagcaaaagtagttgaaaaaataggtttgtaatttgtgtttaataaagattcaataattttatttttttcaataaacaagaaatttaaaaattgtggttttaaaaatttacttgaaaaaatgattaatgattgattttgttttttggtttttaaaaagttatctataaaaaagttcggttcaaaataaagttcatcagaatttaagaaataaaaatcaaagttaaatcattcagaaattgcaagttctaaattaactttttgttcctgatttaagtctttgtattttttaaataaaaccccatgattgaggttatttttttcgcaaaaacttataatttctttttctaaaataaaattaaaaaaacttttataatctaacttttcattttttaaactcgatttaatatctttgttttggatactttcaaaagtaattttaaaaaaagaatttgtagcttcaaaatcagcgaaattagaagaattctgactcaaaaaatcaaaaattattttgtaaatttgttttaatttagctttattttcttctttaattgtacgatgtaatttgttatttttgattatagaattctgaattcaattttgtgcggatttctgttcatataaagaatttaaatatgttcaataagtacgagaatcttcaaatttttttctaatttcttctttttgttctaaaacttcttttttagaatagtaaatttcttttcttttgtttttgtattcaaaaattttgttaaataagttactgaaaatatctttatatttaaaggaagtagctttaaagtgaagattaaaaaattttttaacccagtaagatttatcagaatttacatcatctacaatttttgcaaaattcatatgcaatcaaccgaatcaataatcataaaaaagaaccgaatcataactattttttgaagcaaaaataaatttcctttttcataatcttaaaaattttttgtttaatataataaaaatttttataagtttatctttttttattttaaagtctttagtagcttctttaatatcgttctttaaaagtttttttaataagtaaaaaatacttttattaccattaaaccctttatttttctttaatttttttttcaaaaaataagaaaaaaaagaattagtttttacaaaaatgggttgtttttgggaattagactgtttttcttgatttttccttttataatgctctaaatagtaaatatcgataacagaatttaatgcaaccacatttttatctaatttagaaataaaatttaaataaggtttttccagtttactaagattatctaatttgtcttgataatatttataataactagacttaaattgccaaataagaatccaaatcttttttaaattatacaaaaaatcagattcggacattttttgatcttcaaattctttttctaatttttctaaaattaaatttaatagtttcgaataattttgttgttcaaaaaatgctaattcaaaattaaagtgtttttcttgtaaaaactttctttcaattgagattttttctttgagatattctgagtttgttcgagttaaaaaacgctgtcttaaaaaattaaaaactgaaagatctttgtaatcatcatattcagatttggttaaaaaatcaaaataaaatttatttttatttatttgtttatttaaaacttctccatctgaaaaaataataccttgatattcatcatttttaattaaaatttgcttgaatttacttcataatctttggtctgatgaataaattaaagtatcttctccttttaaaaaattaaaagtgaagtgatcaaaattttcattatttatttgaaagaaaaataaacctaatttttttaattcatcatttgatttcataaatttccaattgtttaataagaatagaaggttttattattaaccataggaataataacgctagaggctaaataaataacacttaaattaattcaaattttaattggagaagttaaaaaatgaccaattaaagcaatatcgaaacgatctaaaacccctgcttgaacatccccagtagctactattatatttccgataggctcatgtagagctgaaaaagcgacaataggagcaattcttaagtatctatcattttttatgaaaaatttaaagaatctagttacaaacaagaagacaatcatactagaagaaccaaatagaattaataaaataccatatagttttttcttaataaatttgtttttttcaacaatttcatctggtactaaaaatatagctgtacttatagaaataataacgattgcaacaattatggagttaaaaattcaagagaaatttaatcagtgtttatcgtattcataaccttcaattttctttatttttgcttcaaaatgaaggattttcttttcaatatcagctctaacttgttctctggtttcagaaattattttagtttttaataattgaatttttccttcatatcttttaataacattagcattagaaaagtattttttaccttgttttacacaaattcagaagaaaattccaggtataaaaccagttactcctaagtaaatggtataaaaaacagaataaagtgaaggtacaaaaataaaagtaattaaatctgataaaacaccagttaaaaaacctactataggtccaaaaataaatccagttaatttaacaggtaaaccaacaactgagtacttaaatgtaggtaaaattgaaggcggaaaaaccctaacactaataattagcattatgacagtaatagaaacaaaaattgcgataaaagcaatagatttattacttcactttttcatctttcccctttaagttttattttaattttactaaaaaaattagttttaaacaacaggaaaaccagttttttaaaatattttaataataatacttttaatgagcgactcttgtgatgtttttagctcaatcaattttgttatataaaatttcataaacaacaaattttactaaatcagataagtagaaaattaagaaagaaattgggaaattagcttcaggactaatgttgatatttggagttattaaaaatacaaccataactaatcaaatagtttgcatcactccaaaagcaaattctcaagaagaagaaatatttgattttccacctgccggaataattctgattgaggttaacattcacattcaaataggattaaatactataattactcaaccactataaaatacttgttccttaaagaaatttgaagctaaatgttgttgttgaactaaagcatttttaagatcagtactgtcaggaaaagcatttttgaatttttgagcccagtcagtcattgcttgaccttttgatatatcaggatttaaagtttcttgaatacctcgctctatacctctagcaaatgagtcaatgtgtaaaatggaaatattataaatagcaagtaaagcagataaaaatacagcaaataaaaataaatatccttttaaaacctttgcatttttagttgcttcttcaattttattttgacccaataatctactaacaaagatggaaatattggcttgaattgaagaaaatgaagaagttaaagcttgtacaatggtgtttgttattcctaaaatagttacaacacctatacctcaagctgcctttcattcaccagctccaattgagccttgtggaaagccttgtggtcaaataaaaatacgtacagaagtagcaattgttccccctgttgtaagaagtgctccggtaattctttttgaaaactgaattcagatgatttttgaaataacaaaagcttttcaaggaacaaaaactagttctctgtttttgaaaaacatgaagaaatatgaagtaataaagacaaccaatcttgcaattacagtagctatcgcagaacctactgaacccattcttggaattaaaattaagtttaaagaaatgttgataactaaagataaaaaagtaaaaaataaagcactttttagcttcttcatctctcttaaaatagaattggtagaaaagttaaatgaaattattaatcaagaaatagcgattactcttaaatagagcgaagcttgattaacagtatcttggtaattaggattattatcaagtgatcgattaccagaaacaactttaatcattgcctcaggattgcttcaagctgcaatacaaaaaatcaaaacaaaaccaattgttaaaatgtatcgtaaattgtttatttctctacatttttctatgtttttgcttccaaaatattgtccaaataatatagcagaaacaaagttaacacctaaaataaatgaaaaacttattcctgttcaagcatttgcaagtccaagagccgtaattccgtttctaactccagtcaccataaaattatcaacaaagttatttattgaaattagaaatgaagctaaaacaataggaattgtaactttagataattgtattaattgatgtttatcggcaggaaaataagctcttatgctttttaaaatgttcattattaattaaagttgttgtcaatacctaaaatttgtacggaatatttttcagcaacatcaatctcaacttcttcacctgtttttcttccaattaatgcagaagctaaaggtgaaagatttgagattttattttgaaaaggatcagcatctaatgaacctacaatttgaacatcatgactggtttttgtcttcaaattgaagatagaaactctagaaccgatggtgatttcatcagattttaagcctgtgttttcaataattttagcttttgaaataatagattcaatttctaaaattctagcttcaacaattccttgtctttcccttgcagcatcgtattcagcgttttctgaaagatcaccttgttctctagctgatttaatttcttcaattaccttgtttctttcaacattaattaaatgatttagttcttttttataggattctaaactttctttggttaaaaaaagttcttcttttttgtctttgaaattcatatttttcctttaagtttaaatatttgtgtattttttagcaactaataattttactattttttaattattaaagaataaaaatttaaatcaatttcatattttatataagaagattttaaaatttttactaatttagtttgtgattttttagaaatatttctaacaattatcaatccatcttttttaagattcttaaaacacaaatcaaatgtgtctataatgtctttatcttcaaacccgtcaattaagaaaaattctatatttgtttcaagtttttcaacaaacatagaatcagtagtcttaaaatctaaaagtttttcttgttgcttaaaagattcaaaatcaatatgtggtttaaaaatgaaattattagttttgttgatgatagaagaaagaaaaaaacaaactccagcagtttctagaaaaatgttgtttttaaaattgttaagattaatagtatttatgatgaattcaagttcttcgatgactcaattgttttttatatttagtaatttatcagcataatccatttctatttttacttcaggaacaactaaacttttacttgtaattttcctattttcttccattacttgtttaacaattttgttctttttcttttgagatcaaataattgcagcagctccaatggctaaagaaacaaaaatagaagcaattaaaactattctaagtcaattaggaatttgcattttcccctttcatttttttaaattaaagcaaattttaagccttttttacaattttatgcgcttttgtatataataaataaagaaaaatggcttttccaaaaaaaaataaaaaaaatatttggaaaatttttgtttttgtatacaattacttttgcctactttttaagagcacaaaaaatattataaaaactataggaaatttcctaaagttaaaagtaaaaacaaaaaaaataaaaaatttattttgaaaaaaatttttttagtgtatacttttagttgctcgttaaaaccagtagcgagaaataacaaaacttagatctttcaaaactagatacgaatttagaattaaaacaaaaccaatttattaaacacgcaatttttttgagagtttgatcctagctcaggatgaacgctcgctgtgtgcctaatacatgcatgttgaacgggatgtagcaatacattcagtagcgaatgggtgagtaacacgtacctaacctacctttaagactgggataaccattggaaacaatggctaataccggatatagttatttatcgcatgatgaataatagaaaggagcttcacggcttcacttagaaatgggggtgcgcaacattagttagttggtagggtaatggcctaccaagacgatgatgtttagccgggccgagaggctgtacggccacactgggactgagatacggcccagactcctacgggaggcagcagtaaggaattttccacaatgagcgaaagcttgatggagcgacacagcgtgcaggatgaagttcttcggaatgtaaactgctgttataagggaagaaaaaatagaataggaaatgattttatcttgacggtaccttattagaaagcgacggcaaactatgtgccagcagccgcggtaatacataggtcgcaagcgttatccggaattattgggcgtaaagcgtccgtaggttttttgttaagtctggagttaaatgctgaagctcaacttcagttcgctttggatactggcaaaatagaattataaagaggttagcggaattcctagtgaaacggtggaatgcgtagatattaggaagaacaccaataggcgaaggcagctaactggttatatattgacactaagggacgaaagcgtggggagcaaacaggattagataccctggtagtccacgccgtaaacgatgatcattagttggtggaatgatttcactaacgcagctaacgcgttaaatgatccgcctgagtagtatgctcgcaagagtgaaacttaaaggaattgacgggaacccgcacaagcggtggagcatgtggtttaatttgatgttacgcgtagaaccttacccactcttgacatcttctgcaaagctatagagatatagtggaggttaacagaatgacagatggtgcatggttgtcgtcagctcgtgtcgtgagatgttaggttaagtcctgcaacgagcgcaacccttttctttagttactaatattaagttaaggactctaaagatactgcctgggtaaccaggaggaaggtggggacgacgtcaaaccatcatgcctcttacgagtggggcaacacacgtgctacaatggtcggtacaaagagaagcgatatggtgacatggagcaaatctcaaaaaaccgatctcagttcggattgaagtctgcaactcgacttcatgaagtcggaatcgctagtaatcgtagatcagctacgctacggtgaatacgttctcgggttttgtacacaccgcccgtcacaccatgggagttggtaatgcccaaagttggtgagttaacttcggagaccattgcctaaggcaggactgatgactggggtgaagtcgtaacaaggtatccctacgagaacgtggggatggaacacctcctttctacggagtacattagtcttaattgactttttacaaacgattcgtgtctagttttgagagctttaagttctcaaatatagttctttgaaaactgaatagcaaataacaatatgattaattcatattaattatttcaacgatcttttttataaccgagtttaatttttaattaaatttctaaaaaatagattaccaatattaaaataccttaagatatttatctttagcaataataggcaatattaaagttgtattaacttttaaattaagtaagagtatttggtggatgccttgggtctgaaagtcgatgaaggacgcgattacctgcgataagcttcgtggagttggaaataaactatgatacggagatttccgaatggggtaacctaactgagcaaacctcagttgcaatttgatgaatccatagtcaaattagcgagacacgttgtgaattgaaacatcttagtagcaacaggaaaagaaaataaataatgatttcgttagtagtggcgagcgaaagcgaaagagcccaaacctgtaaaaaggggttgtaggacatcttacattgagttacaaaattttatgatagtagaagaagttggaaagcttcaacatagaaggtgatattcctgtatacgaaatcataaaatctcatagatgtatcctgagtagggcggggcacgtgaaaccctgtctgaatctgccgggaccacccggtaaggctaaatactaatcagacaccgatagtgaactagtaccgtgagggaaaggtgaaaagaaccccgagaggggagtgaaatagattctgaaaccatttacttacaagtagtcagagcacgttaaagtgtgatggcgtacatcttgcagtatgggccggcgagttatgttaatatgcaaggttaagcagagaaaagcggagccgtagggaaaccgagtctgaatagggcgaattaagtatattggcatatacccgaaaccaggtgatctatccatgagcaggttgaagcttaggtaaaactaagtggaggaccgaaccgtagtacgctaaaaagtgcccggatgacttgtggatagcggtgaaattccaatcgaacctggagatagctggttctcttcgaaatagctttagggctagcgtatagtattgtttaatgggggtagagcactgaatgtggaatggcggcacctagctgtactgactataatcaaactccgaataccattaaaattaagctatgcagtcggaacgtgggtgataacgtccacgctcgcgagggaaacaacccagatcgtcagctaaggtcccaaaattgtgttaagtgagaaaggttgtgagatttcataaacaactaggaagttggcttagaagcagccaccttttaaagagtgcgtaattgctcactagtcaagagatcttgcgccaataatgtaacgggactcaaacacaataccgaagctacgggcacattatgtgcgttaggagagcgttttaatttcgttgaagtcagaccgtgaggactggtggagagattaaaagtgagaatgccggcatgagtaacgattcgaagtgagaatcttcgacgcctattgggaaaggtttcctgggcaaggttcgtccacccagggttagtcaggacctaagatgaggcagaaatgcatagtcgatggacaacaggttaatattcctgtacttggtaaaaaaatgatggagtgacgaaaaaggatagttctaccacttactggattgtggggtaagcaatgagggagttatataggcaaatccgtataacataatcttgagttgtgatgcatagtgaagacttcggtcgagtagcgaattgaatgatttcatgtttccaagaaaagcttctagtgttaattttttatcaacctgtaccgagaacggacacacgttcccaagatgagtattctaaggcgagcgagaaaaccaatgttaaggaactctgcaaaatgaccccgtaagttcgcaagaaggggcgcctattttaaataggccacagaaaatagggggggcaactgtttatcaaaaacacagctctctgctaagttgtaaaacgatgtatagagggtgaagcctgcccagtgcccgaaggttaagcggagatgttagcttacgcaaagcatccaagtgaagcccgggtgaacggcggccgtaactataacggtcctaaggtagcgaaattccttgtcgactaattattgacctgcacgaaaggcgcaatgatctccctactgtctcaacattggactcggtgaaattatggtaccagtgaaaacgctggttacccgcatcaagacgaaaagaccccgtggagctttactataacttcgtattgaaaattggtttagcatgtgtaggataggtgggagactttgaagctgggacgctagttctagtggagtcaaccttgaaataccacccttgctaaattgattttctaacctgttcccattatctgggaaggagacagtgcgcggtgggtagtttgactggggcggtcgcctcctaaagagtaacggaggcgttcaaagctacactcaatatggtcagaaaccatatgcagagcacaaaggtaaaagtgtggttgactgcaagacctacaagtcgagcaggtgcgaaagcaggacttagtgatccggcggtacattgtggaatggccgtcgctcaacggataaaagctaccccggggataacaggctaatcttccccaagagatcacatcgacgggaaggtttggcacctcgatgtcggctcatcgcatcctggagctggagttggttccaagggtttggctgttcgccaattaaagcggtacgtgagctgggttcagaacgtcgtgagacagttcggtccctatctgatgtgggcgttggaatattgatgagagctgctcttagtacgagaggaccggagtggacgtaccgctggtgttccagttgtcttgccaaaggcacagctgggtagctaagtacggaaaagataaccgctgaaagcatctaagcgggaagcttcctcaaagatgagtattccttatgaaattccttgtagactacgaggttgataggttggaagtgtaagtgtagtaatacattcagctgaccaatactaatatattcaaaaatttaaaatgttagtattcttaagatattttaatactaaatattattgctattcagttttcagagaattatcttaaggacaaaaaatgtcctttttttttattttaaaaaacaaaataaattcatttactttttgttataatttttgccagtagagtttaaaatactataaaaatgaaggaaaattatgattacagatgcttttaattgaagaggaaatcaagtagattttgcaagtagtaaagcagtatttttttctatagtagcaattgcttttatagtattatttgtaatttatcttttaagatttaaattgagaaatttttatcaaaatcatccaattatcattaattactcatttaaatttatcgcagtaataatttttttatattcatttgtaagtagaattgctgttttagaaagttatgattatatttataagtgagaatatttgccacttcatttgtgtcgtttaatgacaatagttatcataatagttttattttttaataaaacacaatacattagattttttactataccatcatttgttggcgctactttagctttagtttttactgaaatttcaagaaatgaaagtactattttagatgataaactttataattatgattctaacgttgtctgaaatcgccaaggattagactgaggatatgattcatatttattttgagaatatttaattacacacttaatagttttaatttttccatttttattacaaatggtacaacctaacaaatttagaatcactaacaaagttgtattacaatcctgctttataatatttgtttgtgctacatttttatttacattaaactgaattttttatgctgctagtcatcatagtttaaatgtaaaactacaaatagcttacaatgcaaattgattttattttggacacaaaggcttatctgttttaggtattatttcacaacgaccttatcaattatttagtttatctataatttttttcttagcattttgattgatttgaataatcacaattttcctaaaatgctttgaatttgaagacaaaaaagtaaaatttaataattttaaaatcactttaaaagataattgagaaagaattgacgacttttttaattttaaacaaggtagccgattagaaaatgattaattcttacaaaattaactttgcactgtttagtagaattaacaaaaaagaactaaattaaaacttcatctttcaattttttaaagactaaatatggtaaaattataaaactatgaaccctataaaagaacaattattagagtacatagatcaaaaacaagcaagattaaccagaaataaaattcttgcctttcaattttcaagattaataaaatacatttccttgtttgctagtttaactatagtagtgctagctgcggttgttatttatctagaattaattagatataataaaattccagtagccacaagaaaatcatttttcgatgaattaggtttaacaatagttttagcaactaccattgttttaacttttgttttaaacatttttttgggtgtttacaaagaaataatgaagtatcacgattacaaaaaagctcaacgtgaactcaattatatttacttgaaaatcgaatctgatcctaattactcttatgaaactttcgagtcagattttaaagaaatcaacgatttttatttagcgaaaaaagatgtttccaaactaaaattattaaaaaaagcaattttaggagttaaaaaataatgctaaaacctgttaaattaactagtagtggattagaatttacaaactatttatattctaagacatcaaaaaaagctaaaatttatcaagcaattttttgaacctgctctttattttcgatctttttcgcttttttcgcagcgctcatgggagtttttaaattagcttcttctagacttgatgaatttaaaccttttgcatcaattttccaaatcacagatactagttcaggaaaaccagtaattgtagatcaatgaccaatatttactttatgaatcaacataattttaagtatagtaaacggtttaattgctttatttttagttaaaaacaaatgaattagaaacaaagagctaaataatttcctagaattagaactaattttatttcattcaaaatcaggaaaatataaagacaatcccaaccctgaacttactttgtttgaaaaagtcaatgattactttggtaatacaaccaggttaaagaacagagaggtcaaaaatgactagagaagtgcaaattcaaaaaatcagagaacaaatttctttccttgctcgaaaagccagaatttccaaatctatttttataattgccagcataattttgattttaatggcagcatttaatgggattttatcagcttattctatagctaaaaatcctaacctctctgcagttcgtttatttgtggcaatagcttttttaaatgcgatcattgcttttttaggaagtattacaagtttttttgtgttcgataatatttataataaaaactctaaaaaaatagaatttttaatcgatagaaaaaaagaattagaaaaaaatcctaatataaatttagacgatttagtattacaaatttccaacataaaagttgattcagagtagaaaaaagaaggaatttttccttcttttttattatatttttttaataaaataatatttttaaatttttgtatataattaaagcattaatttttattatttattaaacaaaaaaacacatttttaaaaattttatatttttagtagaaagattgatgaataaaattacatattattcaccatttaaaaataataattattttaaagttttatttaaaataattttcaagaaaaaaagtacttttgcattgccaattgtatcttttattttaactttaatattagcaattattactctgacattagcaaccgctaagtcatttttaatttttacttatattactttatttataaacttactatttacagtagtttatagctcatacaaatttttaaacatttttaaagatttaagctcacaaggcttagatattattaccttcacaaaaccatacactagacagtacatcattttaactaaaattttatttttagtatttttagcttttttatgatctttactttttcttcttaatttcctaatttttttcctaattaacttgaaatatatagatcaaatcaatatgttttacatttgagcttttctctctccattttttactttcttaatttttggttctatttcaggattattagttttaagatttagttcaaaagtatcattaagtttaccaatattaatctttacacctttactttttttaggaagtgtacctgcatttttctctaccccagcaaatgaaaaaatggcagaatatttcaacttaaattacaacaatacagactctaacactattttaagagcagaaaaattttatttaaataacaacaaagataattactatttaatcccaaaacaagtggataatttgtactttgatcaacaacaaattagctttttaaatgaagctaaaaataaagcatctaactctgcaactttatgacaaggtttatcatacattttagttccttatcagtttattaatatttttaacatcaaagatcaagatcctataaaaaccctaactaacatagaacaaaacgctttaagtaactacatttattattcaaacttacaaacagcagaaaacaactatgctattcaaaattctacaaaatcacttaagcaatatgacgttcttgctgataacagaattcaaaaagtgtttttaatcccaggtgctttaaaaaacaacactcaattcgaaaacaagcttgacaacagagaaattatttatgcaaatgaaaatgcaagtaattctgacgcagtttttccagaagatgaagaatcttcaccaaccaacacttctttagtcggtagattaaaatgaaaatatataaaagaaatcttagaatctaaggcctttttacaaacagcccaagccttttataatcaaattgatgataaatctaccaaagaacaaattttagataaaattgcttcatttttaaaggaaagttctaatctaaactactcacaaattgaagatgaaaatacagcagttttaaaaaacaaaattgatattcgtcaaattcaatctttaactgaaaagaaggtttatattgctacttccttgatttactacttattttttaataaccctgattcaaaaattcttgacactttattaaaaaatgaattagataactacgatccagaaacatttaaaataaaaataaatgaacaagtttacaacattggtggttatgcatcttatgcttctcaatctaaaatagtaaaaagacctgtcgacaatcaaccaaatgctcaaacagaagacaaagtaatttaccgttatgatctaactccaagccaaaactttttatttcaacctgtggttgacattattgaagttcatcctacttccaaagtacttcaaaaacctttatttttattaatttgattaataatttctagctcacttttaacaggaatttatgttctatacagtagaaaagattataaataatgaaaaaaacaattttaaaagtatcaaacttaaacaaaatttataaaaattctaatcgaggtgttcaagacattaacttcgaagttttagaaggagaaattcacgcttttattggtgaaaatggagcaggaaaaaccacaattatcaaagcaattgttgacgcttatagaaattatcaaggagacattcttattaatggctttaaaaacacaactccagaagcaaaaaaatttttaggctatgttccagaaaagtctttatttccaaaagaattaaaaacaaaagaatatttacttttattagcgcaactttcaaatcttaataaaaaacaagcaaatcaagacattgataaatttttagaagctttaaatattcaagatttagcaagttcaaaaccttatgatttttcttcaggtcaaaaaagaaaaattgctttaattcaagcacttattcacaatcctgagttaatcatattagacgaaccactagctaatttagatccaacaagtagattcgattttattaagattattcaagatcttagaacacaaggaaaaaccatttttttaagtagtcataacctatctgaaattgatcaaatagttgattcagttaccttgataaataaaggtaaaatttactataccggagcaaaaaaacaaaatttaaatgatctttattacacacaagttatagatgagcaaatagatgaaaaaaattaaaaaacaactacctataattttcagtttttttgcagtttcacctttattaatttcttgtgctcaatcagaagttagatccttcaaaaatgaagaaaaaagaacacaaaacaacttagctactaactttttaaatacaagtttagcttctttgttagactctgtttaccaacaagaaccagcagcaaatgaaacaaaaacaagccaaacttataaagacaaacaaacacaaaaaaatcttcaaaaagatagttttatacttgaacaaattaatttagacactaataaaactttagaagaattaaaatattctttttcctttgtaaacccagcagtttttgtaaatgatagattttatgatagtaaattaacaattgttttttcaaaaaataatatttgaagaaactttactaaaaattgactatttatccttcaaaatatagataaattttactttgcttacaatccatataaaggaaagtacataagcttcaaagatgaagataaagactttgataaaacaagtaataaatttatcactttcgaaaataaaaacttcgatttttataaatttaaacaattttctacgtccaattactatacaaatgagtatgtttattatttggtttatgataataataaaattataaaattatgaacatttgagaaggataatgcaatatttgctagacttgattttgaagttttagtgtttgataaacctatttcttctcttggtttgtttttaacagaattaaatgaacaatcaaaggcttttgaacaaaatattttgaataaaaaaatacaaaatgaacaaaaccttttactttcacagtcagcaaattcagctcttaaaccagtgttgtttcacgatggacatgatgattcagatggagacgatgatggaggagatggaggagattctgatacaggcggaaattcaggcggaaataattcaaacaaaggaagttcggattcttctacaaataaaaaccacgataccgactcagattctaacgatgactataaaaatttagatgtagatgatccagtgtatgacgatccagactttccatacatgaagaaaaaaggcgagagtgatgaagagtgggagaaaagaaaaaatgcttttataaaaaaatgaaaagcagaacatccaaatgcaacttcaacaaataaagataatccagaaggtgaaaaaggaactaacgaaaactctggtgatgaagatgatgaagaagatgatgcaatgttcgaagatccagactttccaacaataaagacaggagaatctcaaaaggactttgaaaaaagaagagatgagtttgtaaagcaatgaaaactaaagcacaaatctaatatacagtccaatccagataaagcaaacgataaaaatattactgacaataaagacaaaggtcacaaccataatcataatgatggtgatgatttagatgacgacgatgacgatgacgatgatatttttagtcctaattctaaattaacattggatgaaagattagacaaaattaaagaaaatttaaccatcgaatttaacaatcaggcaacccaaagagaaaaagctaaatacgaagtttttaaagattcttattatttaactttgctgtctagtttagattctttagctcaaaaatgaggatataaacgatttgcctttagagatgttgttacttcagtaattcaattaaaaagaaactttgtgcaagattcaaatactacaactgaaacaaaaattcaacaaactagtgaatttgataagtttataaatcacgataaagatgttttaaatccaaatgaaactttagaagaaaaaacaacaaaaagcatttatgaagttatcaaaaaagctgcatataataatgataatgtagcttgagaatccttcttaaatacacaagaaggaaaggaaaatgaagacagaatttgaaaagaattaaaagagcttcaaaaagaaattccaaaaaatccagaacactttagtagtcaacataaagaacttttcaaaaaacttgaaacattttattctgataactgattgttcattcttagaaacttagataaattccaaattaaattttctaactgatacgcctttcctgaacaagttaataaactaactcaacaaaaagtacaccattcccaaaaatttttagatgaaattaattcaatggatggggcagacgattattattttgtaaataacaatttagaaagcattcaagttggagatgcttcaattcagtctactacctataaagatttttatatagttaaaaacaatgcgcttattaatattaaagtcattttaaacaaagacagtagtgctgttcaatttaacccattaatttattacttccctaaagccagaacaaaattatctgttaagatattgactcaaattttccaccaagctctttatcatcaaatccaagaattttatgacgcttttgaaaacgattttattaataaatatagatatggttttgttgcccaaatgcttttagaattaaaaggagataaaaatgaaaaataaaaaaatttttatgatattttcttcaatttttcctatatctcttttaatttcttgttcttcttccagtgtctcaacaacagacttaaaacagtttaaacaagaatataaaaatcaaactttcaaacaacaaaaagaagaaaattgaagacaatttttagaaaattctgttgttcaaaaccttttaaaacttgcctatcctaatgaagaagacagaaacaaatatattggacttcaaaaagaaattgattcagaaaaacaaactaaaaaactaagagaagattatttttattattcttacataagaacagaaactgctgcttttgacaaagatagtactccggttttttatactaaatctagagataatatttttgaactaataagaaatgactgactttgatttttatattacataaataatatttattttataaaatcattaaaatctttagacttatttcaaaaaacaggtgaagaatttacagaagatattagagcttccaatacctctagttctcaattttataaacctaaaaataatttctttactaatatgatttatgaagaagtaaataataattttgatgaaacatctaccattattaacagtgttacttattttaaagaatataaaattttatttacaaatgaagacaattttatttttgatctaactgtgagacatatttatgatcctagcaaaactaaagttatagattctaaaataactttttctccatgattgaaaattttccctgactacttaaatggtaaaaaaactgattttaatcttaaacaatactcttttataacacttcattttggtgcaggaaataccttgaaaatagcaagattagataaaccaatttatgaagagtcattaggtggagatccaatagacttttcaataatagattttgattttgacaaatccaagtaatttaaaaaactcttcaaaaagaagagtttttttaacattttcttaacaaattttctttatattttcatataaattattaagtctatgcccgtattctaataatttattttgttcttgttgagataatgttatagttttaattctttttaccccatgaatgttcacaacagcaggtaatgaaataaaattttcttcaaaatcatagtatttttttgcaaaaacattaacaataaatgaatattcttttttatgataaatactatttataaacttaaataaaacaaatgaagcagcaaaatgggggttacccttttttacaaaaatttccatatcttttttattaattatctcaaaaatagaggttaataatgtgctatcagtaattctgtatttttcttttatttcatcaaaattagtaaaataattatttttatcgcctaaaactaccgcatcaaactcataattttgaatttgttctctaagtaatttgtgtagtcttaaattctcaatcattgttccaaagccaacaattttttctaattctaaaccagtgtgttctgcgtataattttgcaagcacagatgttggttgagttaataaaatagtcaaacccttgaaaccagattgtttaacaaaataagcaatttcaacaataactcttgcgttttcttcataaagttcatgttctaactgccctggcataactcggctttttgcgcctattattagtaaatcaatattttccaagtcagaaaaatttcctgcttttattttaaatttagaattagcaaaacctaaaatatcttcaaaatcaagaatatttccatctcttggtccttcaaatttgtcaattattaaaatctcataattatcatgagacaaaattaaattattaattaagccaatacaaactttatcagctccaacaattgctattttcatactattcatttctttattagtaattaattataatcaaaactatattatatttaaattcttatttgttataataaataataaaattaataagattagaaagaaaaataaagcattttccttatgaaaaaactgttcaatttatcaatatttaaaaaaaatttatacttcaacacaattagtcaatatgttttttcaaggaaaaatacatatattctgccgttaataatggttgtgtgaagttttatttactcattaatatctttttcttttgctcacgaagataattttttaatttttagctttatgttttttctaattaaccttctttttacagtagtttttgcttcttgtaagtttttaaatttattttatgatttacataaagatggattagatgttattttgtttactaagtcatattctagaaaatatattaatgcaactaaaattttgttgtgtgtaattttagcaacaatatgatcttttattttcatgggttgtaattgactcttttatctttttaacataacatatattaatcaaattaaagcgtgattagcttgagattttttttcaccctttttcacttttttagtttttggatcaattgcaggacttctagcctcaagactaagttttaaactttctgtgcttacaccgattgctatttttacacctttactttttttaggtacaggaacttctgtgtttgcaaaaccaagtaatttgaattatgcacattatttaaatttacctgattctcaaactgactcacaaacagttttagatttagaaaagttttatttaaataataatgaagatactttttatttgattcctaaaaaactttcaaacacaaaaatcaatgaaaaacaagcaaatctcctttccgattattgaaataagtcttcctcttcttcacaattgtgacaagcagttacttatctttctttaccttatcaatttataaatgtatttaatcacaaaaatcaaggcttactaaaaccaagagtaaataaaaaagatcaagctttaggaaattacatatattataatggtctggaatcttcagaaaacagctatgaagtgaataattttgttggcttaccaacttataatttaaccttaaatccaaccaataaaaaacagtttttggttccaggtgctttaaaaaacaaaacttttttaaaaaatcaaattaacactaacataatttatgcaaatacaaatgcttcaaattttaatcatcattttaaagaagatgatcaaatatttggtgttccaaataatttagttggtaaattaaaatgagaatatttaaaagaactattagaatcaaaaaccttcataaatgaagctaatatgttttttagcaagttatctaataatttaaataaagaagaaattttaagcaacatttcttcttttataaagcaaaatgaagaaaacttatacaaaaatttgaccgacaacaacacagtagtattaaactcagttttagataattcaaaaattaaaagcaacatagaaaaaaatatttatatagcaacagggcttatttattacttattttttaatcaaaataaatcaataatttttgataatttattaaaaaacaaagacggaagttataaacaagataaatttttaattactatagataatgaagactattttataggaggttattcttcttttgtttcagaagaaaaaaatattaataacaaatctatttttagatatcatctaaatgaatcagaaaattatttatttcaacctgttgatgaaatttatcaagtaaaaattaaaacacaagttgttaagaaaaacacctttattcttgagtgaatgctaatttctttattgcttttgttttctttatattctttacataacaaaaaggattatgaataatgaattccaatttaatgttaaaagtcaaaaatttaaaagtaaatttaagactaaaaaatcctatagttaataaaataagtttttctgttaatctcaaggaagttcatgctctaatcggtgaaaatggagcaggaaaaacagcaattatcaagtctattgttaattcttatgtaaattacacaggtgaaattcaaataaataattcaaactcaaaagctacaaattcaaaatcaattttaggttatgttccatcagttatagattttccaaaacatataacaacttataaatatttaactttgttaggcaagatttcaaaactaacaccaactttaattgataaaagagtagaaaaatttttatctatctttaaaattgaacatctaaaaaatcaaaaaccttacaatttttctttaggtcaaaaaagaaaaatttccttcattcaagcgctaattcacaaccctaattttataattcttgatgaccctttagctaatctagatttcaatagtaaattagatataattaatatattaaaacaactaaaaaatcaaggtaaaactattttaattagtagtaataatttagaagatatcgatatgcttgttgactcagttacctatataaaagaaggaaaaattatttattcaggtaaaaaagatcaaaagttagagacttattttacttcacaatatattaaacaaaataatcaggaaaatgtcacaaatgaaagtaaataaaaaatatttttcagtcttatttttgcctttattttctagccttttgctctcgtcttgttcagaggtttctactttttacacttcttcacctactgttcaaaaaaaagacagtaattcaatagaacaacttttaaataacatatatattgacaaacaagatcaaaaacaaacctatatttttcaacaaaatactttagataaaaacaagcaattagaagaattaaaatattctttttctttatataatccaagtttgtttaaaattaatacaaaaataagtcctaacttagattttttagcaaaacaaactatttataataattttagtaataactgattatttattttaagaaatataaaaaactttgaatttgcatttaatccatattctttttcttattctccttattcaggagaaaaagaagattttggaaatcaagaagataaatttttaaaaataaaaaacgaaaacttttcatttataaaaaaagaaatcgttacagaaaataattattgaactgaacaaaatatttattatttaattttcgataaaaataaaattttgagattatgaacttttgaaagaaatcaacaaatttttgcaagatttgattttgacctttttatttataaagataatcctaattttattattagttttattgatgatattcataacgaaattttaagttattctacagaaacgcaatctgaagaaattagtaatatattgtctgatcttcgaaaaagtgaagaacaagaaattaaaactgtgttagataccaataaacaatcagaaaaaaaagattccaacactgaccaaaacgtcgaagaacagataaaaaatattcagtcatcttataatcaaacaattgataaagttacacaacaaattaataagaaatatttagaaaataaaattactcaagaagaatctaaatacaatattttaaaaaataattattatttttctttaaatcaaaaaataaacaatttaaataataaatgacactttgaaaaatttagcttcagaaacatagattcagagacgttacaaataagcaaaaaccaagaagaaaaaaacaacaataatgaagaaaaatgaagtaaatttttaaataacgatgcaattttaaatttacttaatatagtttttaataatcttgcagaaaaagaaagttatattaattcacaaaaatttttagattcaaaaatttactcaaaattaattaaaagttatttattttattataaccacttaaacacaaatcctgatggtaacccgtatgcctatttagtgtctcaagaaaaaataaaaaatttgttttctaaaaactgattatgatttttattttatttaaataaagcttattttatgagaactataaatccaatagattctgtagatagtcagttagatgagttacaaaaggacaactcagaatcttccggtttttacagtccaacctccaatgttttttctgatttagtttacaaaaaagtcgaagataattttgacaaacctctttcacaaactaaagaatattttaaaaagtattcgattctacttcaaaatgaagataaatttgtatttagtatagaagtaattcatacatataacaatttaaaaaataaaataaaaaatactattgtgactttatcaccttatatttttatagtaaatactactaatgacagtgaacaaaataatttaaatttaaatgatttagccaaattaatctttgcaggttcaacaaataatgtaaaaaaatttaatttaactaaaaaaaatataaaattttttaaaaacttaacttttaaatcacacttgtttattttttcagattttttctacaaaaataaagaaaaataaagaaaaaatgttataatttttatcaataaatattaaggaaatcaattaaatatgttagacaagattagacatgacgggaaaactcagaaaaaagcatttttatatgaactcggtttcggttttatctgagcagcaagtcatttttatttaaaaaaagctattataggtattataagagcaggacttttttgagtttcaatattcatgataataactgctgttattgttgaaaaagcaggtgtattagctagaactcaagatgaattttgagcagtaatctgagttggtgtagcatttttagctctactacttatttggtgaattattttattaattcaaattttaactggaactttcaaagataacgaagacactgctataaaattctgatctaccagagaaaaattagtagaagaaattgaaccacaagaaacagtagaatcagaagaaataattgaagaaccaacagatgaatttgcaaacaattttattgaagaaactgttatgttagaagatacagatccacatagagttgctcgtattcataattctaaatgtaaaattcactttcctccaattcagttaacagaggaataaaataatttatatatttaaaaataaagcagatgtaaatttgctttatttttttgcaaaggataacatgagattaaaaaaaattccagatgcattagaacaattaagaaaatctaattttttaatagaaaattttccattaaaaatagataataattgaatcgtagaaattggaatgggtaaaggtgatatgttagtagaactagcgcatcaaaatcctaataaaaaatttttaggaatagaaaagtttgattctgcagcagttaaagctattaaaaaagctcagcattatgaattaaaaaatttttttataatttgttcagatgtaaaagacatattagagaaaattgaaggaaaaacaaatttaatatgattaactttttctgatccttgacctaaaaaaagacatttaaaaagaagacttacatacaaagattttttagtaatttataaaaaattactttcagataaagggattttaaaattaaaaacagataacgatggtttttttgaattttcaacattgtctttagaagagtttggagcaaccatattatattcaacaactgatcttcataatgatattaaaaacgagggtaatatttacacagattatgaagaaaaatgaagcaaaaagaacaaaaacataaactatttagaagtaaaattttaaaatgttttataatttgttttatcaaattaatattactaaatataacaaaacgaagggaaaaaatgattaaatataacaaatttttttcagaaaattcattagtattaagacctgcttttaatacatctgaaaaagagtttttacaaaaagaaaagtttgcaatcactgaatttttatcagaaagagaagttgctatttttcttgaagaacctaaagaattatctttagaagaaataaaaaaaattgcttctattttagcgaaatatccaagagaattagaggttgatttagacgcattttttgaatttttatctcctaaaacacaaaaacaatttgtagaaaaactagtagatagatatatttatttaaacgcggatgtttattcagaaagaagtgataaagaaaaaactagagctaaaattaaagatttaacattagttagctcaagactagaagaactagaagactttatagcaaaagcagaaactgtagcaaatgcagtaaactttgcacgtgtttttcaaaatacacctccaaacatttgtaattcagaatttttagcagacaaaattgtagaaaaattaagcaaaaattcaaatttaaaaatcagagttttaggaaaaacacaaattcaaaatttaggaatgaacttattattagcagtcaacaaaggttcagtttatcaaccaagattagtggttattgaatataacggaaatccagaatctgaagaaaaaattgcttttgtaggtaaaggaattactttcgattcaggtggttataacattaaaaccggaatgtttatgagaggcatgaaatacgatatgtcaggagctattattgcagcttcagctatcgacacaattgctaaattttcaccaaaagttaatgtagttgctgttcttcctttaacagataacagagtaaacggagatgctaatttaccagataatgtttgaaaatcaatgaatggaaaatcagttgaaattacaaacactgatgcagaaggaagattgattttaggtgatgctttaacatttgctattagagaattaaaagctaacaaactatttacaatagcaacactaacaggtgctatgtctattgctttaggttcaacttttacaggaacttttgcaacagatgattccttctgaaaagaatttaaaaaagcagctgagttcgcagatgaattggtttgaagaatgccaatgcatccagaatttgctaaagcaaataactcatcaccagttgcagacattgtaaacgcagattacacaggaaaagctggttcttcttctgctgctatgtttgttgctgaatttagagaagaattacctttaattcacttagacattgcaggaacagcaaatgtagacaaaaacccaactggagttatggttaaaacattagtagaatttatcttacatcacaaataaaaagcttcaaaaatgaagaaaaaaccggaaaatttccggtttttttattttaaaaatcttttaatcatttagatttagttttgtcttttacagatttaaaaatttcactaagttctttcttttcgtttcttgacaattctggaacatataattctaaatgtactttaaaatcaccaattatgtttttgtttcttggatcttttgcccctttacgatatatagtaactacatcgccagatttataattatttttaagactaatattttccattccataaggagtaggaacttctacagagttttcttgaataatatcagcaacagaaacaggtaaagttaaatgaatatcatttcctgctctagtatagtgcttgtgattcattacattaatttttagatacaaatcaccactaggtcccttattttgtccaggtcctccgaagcctgacagagtcatattatctccatttcgaataccggctggaatatgaatatcaacattttttattgttttaataattttttgacccttacattttgaacattttttagtaattatttttccttgtccagaacatcttgaacaaacatttgtgcttttaattttaccaaaaccaccaagtgaaacgtattcttctacaactcctgaaccgtgacaattactacattcttgtaaatcattttttgattcagcacctaaaccatcacaagctgaacaagtttcatatttttctaagtcttgcttaattgtttttcctaaaatagactcaataaaactaatacttatagaagcttgataatcacttccttttataggtctattacttctttttgaagaatttccaaaaccaaatcctgaaccaaaatcagaaaacatatcactaaaaaaatcagaaaatccaccaaaaccttgactaaatccaccagctccaaaaccactatttgggtcgaaagcagagtgtccaaattggtcgtattttgctcttttatctttgtcagaaagaacttcataagcttcgtttacttctttaaacttagcttcagcgtctttttctttgtttctgtcagggtgatatttcatagctaaagtacgataagcttttttaatttctgcttcgttcgcacttttgttaattcctaaaacttcataataatctcttttactcatagaaagaaattttagcacaaaagagcttgaagtgctaaaaaaatttaaatataatcaatttgcttgtttttgaaataaattttatcaattgttgctgcaccaatacacttttcttgttcataaattacaacttcttgtccaggagttacagctttaaatccttgtggatattcaacaataattttgttattttccaaaatttgaatttttgctggaatatcttcttgtctgtatctaaatttaactgaaagtttagttggatcaaaattaggttcaattaaattgaaatttacagcttcggctttatcggaaattaatcattgttcttgatcttgaggagctacataaagaatttttctctctaaattatgtccaacaacaaaataaggttgctccataccatttaaccctagaccttttctttgacctaaagtaaagtacataattcctacatgttttcctataattttattttttgtaatgtctacaatatcgccaggttgagcagggatatagttttgtaaaaagtctgtaaattttctttctccaatgaagcaaatacctgtagaatcctttttattttgagtaattaagtcaagttcagtagctatttttctaacttccacttttgtaatatcagccagaggaaaaattgttttactaagttgataattatttaactgggcaagaaaataactttgatctttagataagtcttttgctttaaaaagttttccattttctgttttagcatagtgccccattgcaatgtaatcagcctgaaaattttttaatgcataatctaaaaagtgtttaaatttaatatttttattacacaaaatatcaggatttggagttttccctgctttatatttttcaataaagtcttcaaaaacttcttcccaatattcctttataaaatcaactctatagataggaatatcaagctttttgcaaacttcttgagcatcttgtcaatctctttcttgaggacaaataaaatcattataagaatcatttcctttaatgtcgttgttcaaagttgaatctcagttacgcataaaaaccccaataacttcatgtccttgttgttttaataaataagctgctactgaagagtcaacaccacctgacatacctataactatttttgccattttattcctttctattagtgaaattaaattataaattaattttattttttctataaaaaagaagcattttttcaaaaaacagcactttttgcttgctatatatatatatatatatactttgcagtacaggaactttttgcaaagggcactaaatgaagaaaattattaatgtttttgaagtatttgcaggcgttggttctcaattgagagctttgaaaaatatagaagaagaactaggagtagaaatcaaatctttaggtctagtagagtgatatattgacgcgatcgtaagttatcaaactatacattctcatgaagagaaaaactcatatgtttcaaaagaagtaatgattagtgaattgcaacaattgactttaagtaaagatagtaaaattccagtttcaaaaaattattttacaaagcaaaatgaagaaaaactaacaaaatattatcaatattgtcttccttttatagaaactttgaaaaatcctaattcagaaaaactatattatacagatataaacaaagtaaatgttatcccaaaggatattgatatttttacttattcatttccttgccaagatttatctcaacaaggaaatcaattaggtattcaagaagacacaagaagtggtttattgcttcaagtaaaaagaattttgaagcaaaataaagacagattaccaaaaactttattaatggaaaatgtaaaatctcttactaataaaaagtttatttctgagtttgaagactgaattaaattcttgaaagaattgggttatacatcaacttgaaaagtaattaattctactgattttggatcagctcaaaatagagaaagagtatttatggtttctaaacttaataaaaaggcttacaactgacctgtaaaaataaaacataataaaactttaaaaaacattttagacactgattctgaaattacaaatcaagttttagaactaacttctaaaattaaaagaaaaggaataactgaatttaaaactacttctaataacataacaaaagcatttataaaagattgatctaattttaattcagaaaattatgtctataaaaatgaaggatttggtccaactttaacagcttcaggcgctaactcaagattgaaattttactttaaaaataaagacattttcagatacataaattatcaagaagcttttaaatatatgggttttacaaagcaagatgcaaataaaattatgaagacaaatttagtatctgaaaacaaaataatttttatggcaggtaattcaatatctgtagaagttcttgaacacatatttaaaaatttaatctgtgaaattaaaaaggaattttaattttatgatcaagaatgttttttgagatgaaatttccataattactaataactttaaaaaagaagaacaaaaagctgccaaatttaaaggaaaaataaaatttatttatgactctaggtctttagtcataagacatttttactatgaattacaaatgtgtgaaattgatgtgttaacaactcaaagttgatttgagagtaaaacaacaaatttcagaactagagaagaagtcttttcgtttttaggtttaagtcaaaaaatcagaacttttagaagtgaacatgacattgttgaattagattcagcacaattagaaaaattaaataattatttaaaacatagttataaatctacaattaaaaattttattcctttgacaagaggttctaatccatcaggagaactgttatcccccgataatgctcctataatattagaagaaaaagtaccattttttaaaagtaatttttctttgttttttactaatttttttgaagaatatgaagaaataacaagtcaaaaagaagaaatttttgcaaataaaaaaatgcaacacaattactttgaacttttacaagaaaaagctcaaaatccaaattccaaattttcaaaaattctagaaattattaaatatctttcaaatccaaacttgtttaatcacaagagaaaagaaatgggtaagcaaaaaatagaagagttaaaaaaattaatttctacagaaaatatagaaaaattagttcaaaaaagcagacaacgttttgcacaaaatgttgagaaattttcaaacaaaatttttgactttagttacacagaaagagctcatatttgacctgttagtgacattaaaaacaaactaatcgaaattgataagcaacataacaatgaaaagcaatttttagattatcttaaagccattgaagattttgaaaattacttgaatttaacaccaaatttacacacagcttttgataaatattgatttacttttgatgaagaaacaggaaggttaaaattcaaagaaaacaataaaaaaacacttcaatttaaagaagaaatttcaaaaaacggcgaaattgacaaaattcttcaaattcctttgccttttttaacaaaaaacagaaaaaaatatttagaaaaaaggaataaacaacatataatttagagtataaatcacaattataattgtttaaaataaaggaaaatacatgaaaattatatcagttggtacaaatcacgcaggtacctcatttttaagaacttttagaaaattaaatcctacagcagaattagtaacttacgatagaaatacagacatttcatttttaggatgtggaattgctctttgagtaggacaagaatttgaagatccaaatggtttattttattctaatgttgaagaattaagatcacttggaatttcagtaaacctagagcatgatgttattgaaataaatcgtgaagaaaaatacgtaatggtgaaaaatttaagaactggacaagtttttaaagacacatacgacaaattagtttttgctggaggaacttgaccaattgttccaccatttgaaggtgttaatttagagaacattttaatttcaaaaacctttacacatgcaaaagaaattaaagcaaaagcattagatccatcattacaaaatgtaattattattggtggtggttatattggaattgaattattagaagctttccacaaatatggaaaaaaagttactttaattgacatgcaacctagaattattcctaactacttcgatgaagaatttacctcaaaaatggaatatgcaattagaaaccatggaattgaattaaactttggagaaaaagtagaaaaattcttaacagaagatggtgtaacagtttcaggtgtacaaacagataaaaacacatatcaagctgatttagtaattttagctattggatttagaccaaacacacaaattttagaaggtgttgaaaaattaccaaatggagctgttttagtagacgaattccaaagatcattaacagataaagatgtttatgtaattggtgattcagcttcaatgtgacacaacgcaacagatactcacgcttacattgctttagcaacaaacgcagttaaatcaggtatcgttgctgcattccacttagctaaaggtgaagaaactcttccatttccaggttatgttggaacaaatgcaatttctgttttcggatttaattattcatcaacaggattttctgtaaatggatgcaaaaatcatccaacaattgaaaatttcgaatcagaatatttagaagactgagatcgtccagaatttatgcaacacaaatctaaagtttgaattaagataacatatgaaaaagaaactttaagattattaggtgcacaaatcggttcatatggacaaagttttaatcacacagaagctatttacttcttatcattagcaattcaaaaaagaatgacattaccagaaatagctctatcagatttctatttcttaccacactacaacaaaccatttaacttcatcttacaagtaattttaaatgctttgggattaaattacaaagagtaattaacttataaatttataaagaaaaaacaagcaaaattgcttgttttttctttatttttctttgactttaacctgtcataacatcttctgttaagtattcaaatttattaaatttattcttttcactagatcaaatcaaaatagaagagctaataccaagttgtcctataaacataataaagattaagaaagttttagtatgtatatttaagtaatcaagtatgcctgtggataatcccgttgtaccaaaagctgaatttatttcaaagaaaagatggaataaattaaaggttctatatttttctaaatctggaattgagcttgaaattaaaggattttcaatcgtttttgtacttaaattatcaaaagaagaactacccactaataaagcaataacaactaaaaataaagaaataaaaaatactacagatgctctatcagagttttcaaaactaatagatcttttaaagctatgaatagattttttacctaatattttagatcaaatagataatatgattatagctaaagttgttgttcgaatacccccacctgttgatgaaggtgaagaaccaataaacattaaaagagatgaaataattaaacttggctgacttaaatcataagtatcaaagactgaaaaaccagcagatctggtagaaaatgtgtagaaaattaaagcaaaaactttattagttttagttccataattaaaagaacttgaatcccctcaaaaacctaaagaagaaccagatttgtttcaaaaagaatgtggattgttggtttgagtttcaaaaattaaaataagactaataccaataattgcaactataaaataagtagaaacagatattttagaaaacaaagaaaacttcatcggatacctttgatttctaaaaattttgcttcttatataaaggtaaatatcataaattactggataaccaatacccccaataacaaaaagaataattaatcagattaatacaaagtaattagaataataaggagcaaatgaatatttcccaacaatatcaaaacctgcattattaagagcagtaattgtatgaaaaatagcatatctaattgacaatccagtgtttttataaggatttattagttcttgattattgtctattgtttgtaaaggttgaaaatctcctggaacattatagaagtaaaaagataggacaaatgaagaaaaaattattaaaattataaaaattgttaagctagaaataataacgccttttatttcgccaaacttatttgctccccgttcagtttttactaatgatttttggaataaagataatttgaatctaaaaatatagttaaaaatatagatttttcaagcaaaaaagccggctcctccaatcaaaattaaaatagccacaatcgcttgtccaaattgattaaaagtagttgatgtagttttaactaccaaaccagtatcactaaaagcagaaacagaagtaaaaaaagcttcaaaaaaacttatgttttgttctttttgtaaggaaatttttgaagttaataaccctgccccaataagaataattaatatgtaagttaaaaaaattcatttaactttattaaatttcaagaaattattaaatttgttttttaatacatctaaaaaattttttatatttatatcactaaatttcatagttttgaataataattttaaattattttatgaatataaaagaaattttgattaaattttaaattcttctttactttttaatacttttttatagaattttagcaactatgaaaaaacaaaatatttgtgtcataggggctggacgtttaggaaaagctactatcacacagcttcataaattaaataaatctgttcttgtaatagataaagatgtaaaaaatttaaattcaattaaggattatgcaaacaatataatcgaagcagatgcagctgatatgaaagcactagaagctattggtttcgaaaatatagatacagttattgtggcattagcagataacacagaaattattgctgctttattagaattaaaagttaaaaatataatagctagagctgtaaacaaaagacatgcaagggttttaaaacaaatcggggttaattgaattgttagtccagaagaagaagcaggaatccgtttagctttattttccaccaacaacaacttttttaagtattctgaaactttacaagaacttccaggaggttttgttataggttcaactactataacatcaccaaaatatgcgggcaaaacaataaaaaattcaaaattttcaaatttacaggtttctgttgttataattaagagagaaaccaacactattttgccttatggagaattagtacttaacaaagatgatttagtaacatttattggtcaaattgatgatgttattaaagtttttgagctagtaaatcctaataaaatagcagataaatcagagcaaaacgaaaatttttaaaaaaaaataaaaaaaatattttgcttttttaaaaaatagtgtaatatattgtaagagcaacgatagcaaaggggatcacctgataccattccgaactcagaagttaagccctttaacgccgacaatactagagataggaagataggaagttgcttttttttattattttttttcaggttttcagtaataattaaataaatatgacatttacacaagaagtaaaacaagagattttatctataaaatataatttaaaagagtgaaattcttttttaagagggattatttattctagttttaaaaataaagtaaatacaaatcaggatttttttgaaattagaataaataaagaacatatttcaacactaattaaacaaaaattaagtaaatttcacatcccttactttaaagacacaaaaaataaaaattgaattatcataaataaagaagattttgacatttccgaatctgattgatcttctaaatcctttttagctggtgtatttgtgggtacaggaactatttctaaattagatgctcattcctatcatttagagataaaattttataatcaagaaatttcaagcaaagtacaaaaaaaattagaaaatcacactttaaatttctttcaactacaaagaaataacaattttattttgtatataaaaaaatcagaacaaattcttgattttctaggttttattggagctattcaaagttttaaaaaactttttaacataaaaattcaaagagattatgaatctaacgcaaatagacttacaaatttagatattagtaatgcaaaaagatctggtattgcttctgaaaaacataataaaaattaccaatttataataaaaggaagacttttacacttgtttagacaagaagaaattatcttttttgatttaaaatcaaaagaaccaaacttatcactaacacaaatggttgaaattttggaagaaaaatttggaataaaaaaaaccaaatcatcattaaatcattgacttataaagttgaataaaattgttcaaaaatactcttaatttgctataatttttaattatgaatttcttccaaaacgcttttaaaaagtctcaaattcaatttgtgcaagcagatgaaaaaagactttcaaatagattattaagctattctctaatgtgattatcattaggaatttttctcattgcaattttgagttttgcaatacttgctattaatccaattagagaagcatatttcaaactacttcttggagtttccgggtcagcaataggattattagtaactaacttagttcttacttttgcttctattggtattatgctttttattagtaatcaaagtagaagacaaaatagttcattagctgttttagtgccgatgtatattttgttcataattttagaaagtttttgactaccagctctaatttctgctttatttttgataagaacaatagatgataatttttcttttgtaatagagagtctagattataaaaccatttcttatattttattatcatttataattcctgcaggaatatttgctattattggtgcactaggttgattccaaataatagatttttcaagatttgtaatttttatttgagtaggattggttgtagaattaattttatttatagtttcatattttatttttaatagcattattaatgcgatttatttagttattgcaacacttgtcacttttgcaatgataggttacaacttctgattaatgagacaagagagtttatactgattagctactgataagtataatgaagatttaaaagcaaaattcttacgtataggtttagcatatggaatgttcttattagtatcatatttaagattagtaatcatacttttaaaactattttcaagaagataaataaagaaaaaagaaggaaattatgaaaaaaaatataataaatgtagatattgaaatttctttaaattcaaatataaaatatgaatttgatagagaaaaaaacaaattagtagttgacagaattttaagagaaccttttgtatatccagctaattatggtgctattaaaaacacattagattgagatggtgatgaactagatgttttagtatattcaaaagaatctttcattccaggttcacaacttaaagcaagaattgttggtgctatgaaaatgatcgatgatggagaaattgatacaaaattaatagcagttcatgaggatgattatagattagctcacattcaaaaattagaagatttaccttcaacttgagtattagaagtagaatattttttctctaattataaaaattggaaacgtccaggaattacttcagtagacggttttgaaaaagaagaatgagctttagaagaattagaagagtgcaaaaaactatttgaaaaatataatcacctttcaaaagacgactttttaaaagaaatgaagaaaaaacatccagaaaaatatagataattactaaatattgtaaaataaaactacagaaaattctgtagttttattttacaattaagattaataaataaaggaaaagaagtaattatgtttgaattaatatcgaaatttaaaccaacaggtgatcaacctaaagcaattgaaaaattagtgcaaggcatcaaaaatcacaaacagcatcaagttcttttaggagttaccggttcaggaaaaacttttactatggcaaatgtaattgcgcaattaaatagacctgttttagtgttatcacataacaaaacattagcacttcaattatttacagaatttaaagaattttttccacacaacagagtagaatatttcgtttcttattttgatttttatagaccagaagcttatttaccagctcaagatgtttatattgataaaaccagtaaaactaatttagatttagaagcaatgcgtatgtctactttaaatgcacttactatgcgtagagatacaattgtagtatcttcagtagcttcaatttatggagcttataatccaaaagaatataaacaaagctttataaatatagaaattaatcaaaaaattaaaccttcagattttgcaattgagttagtaaaaagacaatacaaaagaaatcaagttgacacagtatcaggttcatttatggtcaaaggagacgtgtttataatcacaccagcttgaactgatagttacttaataaaaatagatttttttggcgatgtcattgaaaaaataactaaaattaatcctgtagataaaaaagttttaaaaacttatataggttataccatttttcctgcttcagcttattctctaacttcagatactattgaagaagctataaaaactattgaaaccgaattagattttcaactaaattactttgaaaaagaagaaaaattagtagaaaaacaaagactcaaagaaagagttttaaatgacatcgattcactaagagaatttggtttttgtaacggaatagaaaattattctagacatatagatcaaagacaagctggtgaaaaaccatatactttgttagattatttaccaaaagatgcaatcatttttattgatgaatcacatatgatgattcctcaacttaatgcaatgtacgaaggtgatagatcaagaaaatcaaatttagtagattatggcttcagacttccttctgctttggataacagacctttaaaatttgaagaatttgaagaatttcaacaccaaaaaatatatatttcagcaacaccagcagattatgaaattgacaaagcagatggcgaagtaattcagcaaattattagacctacaggtttactagatcctgttattgaagtaaaaccaacaataaatcaagttgattttatttatgatctacttcaagaacaaaaagttaaaaacgaaagaacactaattttaacaaccactaaaagaagttcagaagaattaagtaaatatttacaaagtaaaaaacaaaaagtttattatattcattcagaatttacaacttttgaaagagaagcaattctaattaagttaagaaaagggatttatgatgcggtgataggaattaaccttcttagagaagggattgatttgccagaagtttctttgattattgttttagatgctgataaagagtcattttttagatcaaaaacttccttgattcaaataataggtagagctgctagaaatgatcatggtaaagtaattttctttgctgacaaaataaccaaaagtatgcaagctgctcttgatgataatcacaacaaaagagacattcaacaaaaatacaataaagaaaacaatattacaccaaaaactattttaaaacctattgttgaaagcataaaagaaaaagataaaaacgctattatttctttaattcatagtaagaccaaaaaagatttaaaagaaaaacaaaaattaattgattctttaagaaaacaaatgaaagaagctgcaaaagaagaagattatgaaaaagctttacaattacaacaagtaatttttgaactagaaggtagttaaaaatccttcataaatgaagcaaaataaagaaaaacacttgttttattcaagtgtttttcaataaattaaattaattttttaatgaaactttctatctataaattgaaattgatcagctacatcaaatgattgatttgttcctaaaataggagaattataatctaaagtaaatacttttgtaaattgtcttcttcaagtacctgatgattgatcataaataggtttagggaataaaacagttaattcaaaactaaagaaatgaagaatttcagatgaaagtaatcttaatgacatgtttgataaaggtttgaagaagatttttggttgtgtttgatcggtagttcctgtaagagtaaagaatctttgagctaaaggtagttttctaaattcaaaatccaatcttgaacctttaacgtctacagtaccaaatgatcttccttcttttggtcataaagaaagatttcagtatgtagttcttctaaaagaatctcttagttcttttagaagtcttccatcaattccatttcagtgaaacttaacatctttaaacgctttgtcttcatttttgttgttttggttgtaaattcataaaggtattgagttgttttcgtcttcaataattacttcttttaattcactttgttcttgtgcatattggtaatacaataaatcacttgctgagtttcaattaccagctacttttctatattgtgaagcaattgaagcaaatgcccctggtgtttcatatgcaactctgaactccactgttgtggtatacccgaagtttgcaaattttccgtttcttcttgttgttaatcttactctgtcaggtgaatcaccacttgctacataagagaacttaaattggtcattagctctaaagtttacataatctcataaaatattattttttaccacagagttataaacaggataagggctgttgtattgtagaacaacatttgtaggaataatttctttaattggagttcagtcccatttaaaatctgatttgaaaattaaacgatttacatagacaaatgaagtagcttttcttctttcgttgtaaagtaaatcaaagaaaggtgagtctgaaaatccttcttttacaaagacagttctaaacactaaagcgtttacaaaaggaagtaaagttttatcaataacttttattactgaatttggattaatagttgctgagtcgttgtataaactattaaaaatgtcataaattaaactaggagcttttgaagaattattaaatccaacaatagctttagcaacagtaataaaagtgtgtttgtaagttgtacctaatgcatctaaaaatggtttagtatttcaatcatttctaaataaagcaaccactaatcttactaaagcttcagataatttgttgttagcgaactttctgatatgttcatccaagtgatttaaaagatattgcgctaaaccaaataatggttcatttgtttgttctgaaattaataatatttctttaaaagtattaaaaccttgtggtaatttttcaactgcagctttaagttttttatagtattcacttcagttatgaatagattctcttttttttcttaattcttcaagttctccaaagtattttttttcatattcactaccttgtactttgtacatgtgaattaaatcagaaagtactgaatctttatattcagaacctacataacctgaagacataatataactaattaaaccaaagtcttgtgaattaatagcaccagaagtacttaaaaaatcagcaattgatctatatctatttttaataatttctcttgcagacttattatttaaaatatcagtaaaaatttctttaaatcttcaagcagtattaagaaaattcatattacttgcttcaatatatttttgaagattttgcttcattttttcttgatttaattgttcaaaatcttgtttaaatgaaactttttgaacattttgaagttgttgcaaatgttgtgcattatcatgtgaattcggagtagctactgcacttgcgaattgaacagcagttgctacagttttcaaagtagttttcatagttctgttttcctttttatgtattttttgcgcaaaaattataacactttattaatttttttattaattacttgttaaaattaagttttagtgtaaaattatatagccactaaaacaataaccttgtaacctggtcaggatagaaatagagcagccatatcgagaagtgttgtgtttggtggtttttttatttttaatttttcaaaaacttatataattaaaaaacgactttttaatacatatataaaagaaaaatttttaaaaacgaagttttaagaaagaaaaaatgaacaaaccaaacaacacacaaaaagtttcatttactgaaaaagtaagaaaattaaaaactaaaataaatacagatataaataatgaaatattttcactcaacagtgttccaataacctttaaaaacttttttgttcaaaagcgttgaagtatctttatgatgttagtagcttcgtttttgtttactgttggtgttcatatttttattggaaaagcagaagttgttcctacaggtattgctgctttaccagtattaataaatttaatttgaccagatactagtccttatttttctgttttatacttagcgtttaatgttccattaataattttaacttttaaatatgtacgaaaatccttcattttccttacagttgctggtatgttatttcaaaacttatgaactttcatttttgaaattcctgaaataaaaacttgaattaataattctattgacatttcagttccttataaatctaacaacacttgagaaattatgttttatacattaataggaggtgtaattgcaggttttggaataggaattggttgaaaatttggaggttcaactggaggaactgactttataacaaattacatttcaggtaagtataaaaaatctataggaaaaatgagttttatattatcaattgcttttgctgttgtgtctataataataatttctttaatgaaatataattatccagaaaagtatggttcaccttttacttttattcaaatcataggtacatttatttatttaataacaacaactactttcttaaataaaatttatccaaaatacaaaaaaatgttacttactatttatacaacaaaggcagaagagatttttacatatctaaaagagacaaattactgacattcatttcatttatgaaaaggtatgtctggatacacaagaaaagaagtttacaaaatagacacaatagttttttatatagaaattatagcaatattaagagaaatttctaaaatagattctaatttctgattctcaatttcaccaattttgacaactacaacaagaattaatacatcaaaaattgattaaaaattaaaatgataataaagtttaaatacaaagtacttactaatgaagattctaaaaaacaattaattaattatttttttaaacacagaatttttaacaaatatataaacaaagatgaagaaaaagaaggaataaaagttttttattcttctttttttctttacttaaaatttgaagataaaaagcaatttttcttgatttttcttcattttcaaagaaataccaaagaagtctctatagtaaaaaaacacatatcaagattttttaaaaaagtaaaaaaatatagtaaattatttctattaactacagatactttagtaggtttaggtacttttgtaaacaaaccagatttaaaaacaatataccttctaaaaagaagacctttagataaaaaaataataattttaataggaaaagttaaccaactaaagacctttatttcacaaaaaaacttcgaaaaatatcaacaagattttgacaaatactgaccaggttctacttcattaattatagaaaaacaaggttttagaattccgaacaacactgatgtgcaaaatcttcttcttcaaaaaggacctgcttttgtatcgagtgcaaatatttcaaaccaaaataatttaactctagaagaagcaacaaaaaaatttacttgtattttaaatgtttataatttaactgtaggaaatggaacagcatctacaataatagatttaaaaacaaaaaaagtattgaggtaaaaatgagttcagaacaaaaaccaaaaacaattaaaattgcattcgcgtcagatcatgctggttttaaattaaaacaagagttaattgaatatttaaaagaaaaagggtatgaaactatagatttaggtccaggtagcgatgcacaatcttgctcatatgcttattatggaaaaaaacttgcacatgaaattttagatcaacaagctgatctaggaatcggagtttgcggtacaggtttaggaatttcatatgcgcttaatagattcaaacacataagagcagctagagttgttaatgaaaacgatgcttatttagcaaaattacataataatgctaatgcacttgctttagcaggaagatttacttcgttagaagaagcaaaaaaaattgttgatacatttttaaatacaaaatacgaaggtggtagacatcaagcaagaattgacgagcttgatactgactaatgccagaattaccagaagttgttacagttgttaatcaattaaataaagaattaacaaacaaaaaagtagcatttataaaactttataaagaaaaaatgctaaaaaattccacactagaagaattagaaaatagcttcaaaaatgaagtaattttatcagttactaataaaggaaaattcatagtttttcattttagtaatgataaaattttgctttcacatttaagaatgaatggcaagtattttttaaataattcagctagaaaagaaaaacatacttatttagtaatgggttttcaagacgcaagttttttgcattataacgatacaagaatgtttggaacttttcatataaaaacaaaagaaaattatttaaaaactcctccactaaatcaagttgctttaacaccaatggaaattgatttagaagacttatttttaaaattacaaaaaagttctagatatataaaaactactttattagatcaatcagtaattgcaggtttaggcaatatctatgtagacgaagttttatttgcaagtaaaatccatcctttaaaaaagtcaaatacattaactaaaaaacaagtagaattaatactaaaattttcaaaatctattttattaaaatctattgagttaggtggttcaacaataaattcttacgcctcacttaataaacaagaaggacagtttcaaaattttttaaaagtacatactaaaaaaggtttgacttgtccggaatgtaaaaatattatagaaaaaatagtagtaggaggaagaggaacatatatttgttctaaatgtcaaaatgaagaaaaataaagcatattttagagaacaagaagaagaaaaagcaaatcaaattttagataatttttcaaattctttttcaggtattaaacaaacttataattggtctatttaagatcaaacttatgatttacatggtttagatactcaagaagctgtggctaaaattatgaatattttaaaaaccttagagtataaaaatagtgtaaaaatagtcacaggaaatggcttgggtgctttaaaatccgagttgtttacaataattaaagaacaagatttagattttcagcgttgcccacaacaaccttcttcttgttttataattaaaaaaaagttataaaaatccaaaaatatggtaatattagcgagtattgataaatcaatattaattatgattatgacatttaaaaattattgaaacaagaaatctgaatttattaacaatattactatggcaaatattgcattttttgttttaaaaatttttgaataatataaaaaagtgaaaataaataaataaaaaagcttgtattgttcaaaatacaagcttttttattgaaattagaaaggagtaatatgttaaaaaagaaaaaattactgttgggttctttagtctcaactattccaattagtgttctagtttcttgtggtgtgactccactgtgacaaaagcaagaattagtaagaaatgtcaattcagcagatagtagtttttatgctttttatggttttactaactttgcaggttcacctagtagagaagatgattatttaagaagtggatcttatttagttcaaacaatgtatgaaggtgaaactattttaagtaaagaagctcaacctgatagagtagaacaaggaactactataaaatcttatcaatacaaatatacatcaccttcttataagtatttggttttagctttagcaaagagatttatagtaacagcagaagatgaaaatcatgaagaacaagtatatattttcgataatgataagcatgaaataggacatttagcttctaacgaaaaacaaactcaatctatttatactcttagctccaacgatccaaaatcaataaattcacagttttttagagatactttagctaaagcaaaaaaacttcaaattgaagtaaaaaaagatgttccttgagtggattatcaagcaaacaaaaccgaatatacagtaaaaccagaagactttttctattcttgaaaattaaaaaatctatacgatcagcattatagacaatcacatggtggaagtaaagaaattgatgataaagttaaggcatctattaaaaatttaaatcctcagtctgaaaaatttacatctgatttaagcaacgattatctttttaaagttttcggtattgataaaaataaactgcttgatgaaaaaacttttttaactgattttcaaggcgaaaaagtattaacatttttacctctggaaactaaaggtcttcaagtaaattactatcaaatgttacaaaaaattgtttttgattctaactatttttcaccagttccttcagaatatatagcaaaaagagttgctgaacaaactaaagaagtagaagttgaaaaagaagttaaagacaaagatggtaaaccacaaaaagacaaagatggtaaagaaataaaagtaaaagtgaaggaaaaacaaggattatttggtgaaactggagaagctttaaaatatggaatttactgatatggtaaagattatgacaaagacttactttatgcatcaccttgaatcattaattatggtgacaaaaataaaatagtttatataagaaatccatattatccaagaacaggttgaaaagaagctgaacctagttcatttaaaaaaataacatataaatattctgcttatcctaacgcatcagcatttgaatctgctcaatttaacaattttaaagaacaaactaaggcatcaagtgggtttgaaggtttatcagataatgataaaaaatatgcactagctcattttgaagaattaggtggaagatatgtattaggaaaagctttagatcatattccatgactcacttattcttctttaatgcctggttcaatgaatcaagtaattacttcaagtaataatcaagatgttagatatgatgatcctacaaaactatacaaatttaatgatgcattttcaaaactttactttggacattccttagaagaaatagcaaaaggtggagcaaaggttgtaccttatgtttttggaggtagaggactagaatttagaagcattatttatgcagcttgaaatgtttacaccatcagtagaggactttcaaatactgcattaccttgatattcttttgtttctccagataatgttttagctaaagacaaaacagcaagacaactttatgaaaaagtttctacaatttttgctgttgatcagaatggaaacaaattttatacaaaaactccagaacaagaaaaacaacaaaactttaacaacccatcaagcaatgcgcttcaaattcaagcacctaactttgatattttaaaaaataaaatgaaagaacttctagacgatttttatgctaaagaaaacttaaaaccagaagataaagtgcaatgaacactagctacacgttatacaaatgctactaataaagaaatttctgcttatcaacaagctgccaaggctatagaagcacttgatccaagattaagtgttgatgtacaatctgaagtacctgttacaaaagataattacttaaacttcttaatcagaggtataggtccataccactatgtaggttgaagttatgattacaatggagcaggtacagcaattgacggtttaacacaaagcgctggatttggtttagcagcagctagctattttgcttctttagatgcaaattctaatttagctaaatctttcccaatgttttataaatattcaaaagaccttgaaactttcttctcaaaagaagaatataaaggaaaaatgagaccatttagtgagtgaaaagattctccaaatgcaccaaattttggtcaaagaaatttaaacgatccaaatgataaaaatagagatcaaagacccgatgtaactaaatgaattactttccgtgttgttgaaaaacaagatccacaaactaaaaaaatggttaaaaaattcgaacaatacgataaaaacttttctttaggtgaagaaacaggattgtttaataaccaattccaattaaatcatagtgatgaagaaattgctcagcttctctccgaaattacttcattatatggttttttaccacaaactgatggaataactacaataggaagtacaccaacaatttcctttttaaatcctaatttacaagttccagatacagaaaactcatttgcagttccagatcaaactgtcataaaaccatttcttaaaaaacaaggagaacaataatgctgactaagtacattttaaaaagattattacttgcagttgtaacttttatagtaatttacattattgtctatctaataatggcaaaatttggaaataatccttttataaactcaattgattcagctaaatctaaatctacagacgctagcgaacaattagcaaggcttcaaagagaaaatggatttgaccaaccagctgttgttagattatgaaattacacagttgggattttccatggagattatggaaaaatttataaatcaagtgaatcttcaattcctgttttgttttttaaaccactaagatatacaattttagtttcacttccttcatttatcatcagtgtaattttaggagtaattttaggaacaatttcagcttataaaagaggaaaatgacaagatgcttcaattacttcatttgctacagtttttgttgctttaccttcatttatcttagctccatttgtgattttaatagctctaaaagttcaacttccttttgagtttaaagaagcatctgaatattctgtaggcactatgattatttcattgataccaccaatttttgtttttgttctttcttctatagcaggttatacattcttagtaagaaactgagtggtaacaacactttcttcacaccaagtgttgattgcaaaagctaaagggctttctaaattcaaaatttttacaaaacatgttttcagaaatgcttcaattcctttagtaagaacactgattttttcatatctagctcttctatcaggatcaattattttagaacaatttttcagaattccaggttcatctacaattattgttaacgcaattcaagatggagaaattaatatttcaatgttttctttaattttctttacttctctttcattagttactgatattgttgccgatctttcctatgtttttatggatccaagaatttcaattgcatcaaaatcagaaagaaactactgagcagaatttaaaacctgaaaatcaagaaaagaaaaagttaaaaaaggagaagtaactaatgtctaattcatcacaagaatttaacacaaaatatcgtttaactcagcaagatttaagactattaaaagtttctccaaatcactttaattcctttcaaattacaggaaaagtttctgaactttgaaaagacacaattaaaaactttttcaaaactccacttgctttaattgctacaatagtcttcattttgcttcttttaacagcaatttttacagctgctttttctccttttaaaacaacagaagcaattgcaggtgtagatagtgaacttgtgttttcacaaaaaccaggttcttgaggaatttttgaaaacaacatttcagcagaccttttaaacaagattttaaaagcacaagcagatgcaaacgttcaactaattcatggttcagttgaagaaatagtacctggtagatacttagctcatttcaacccatatgaggtgatttcggttctatcacaaaaacaaatattttcaattgtaggaaccgatgaatttggacgtgatatttgactaagaacttgagtaggaacacttaatgctctaggaatttcagtaataattgctgttatagaaactattataggtgttgcgttaggtacttatttgggttaccatattggaaaatgaattgacaacatatttttaagagttattgatgtttttaactctattccttgaattgttatcttcgttatctttattggtatctttggaccaaaaacaatagttataattattttactaacagcaacaggttgaactggacctacttatttagccagatcttatacaattattattaaagatgaagaatatattcaagctgcaaaagctgttggtgcttcaaaattaagacaaatttactcacatatacttccaaatattttaggaaaactactttctggttttgtttccagattactatctgctatatcaattattgctggtttagctttcttaggatttttaaaagaaaaccttaattctccagcaaacttaggactaattattaactcttcaagacaattagctgattcaaatatttgagctttattattcccatcctttattttagttattttagctttaagtacaagatttatagcaaacggaattcacgacgcacttgatccaagaattggaggaagaaaataatggtaaattcagaagtaaaaataaatttagaagataaagttttagatttaaaaaatttaaaagtttccttcaaaataaaaggtaaaaagtacgtagaaatagtaagaggcgttgatttatcaattagaagaggacaaatagttggactcgtaggtgaatcaggttcaggaaaatctgttacttcaaaagctttattgggtgttaacgaatttgctaaaacaagtgctgataaaatggtaattagtggcattgatgttgctaaattcactaaagataaacagtggctacaagttagaggtaaaaaagtcggttatatcccacaagatcctttagttgctttaaatccaacaagaactattggaaaacaactactcgatgttttagaaaaatcagaaagattcaaaactaaacaagaaaaagaagaatatttaatcaatcttttagaatcatttggtttagaacgtgcaaaagatagatttcattcatacccacacacactttctggtggtatgaagcaaagagtgattattgctatgactgtggctgcaagtccggatttaattatcgctgatgagccaacaacagctttagatccaacagttcaagcttcagttcttgctttatttgaccaaattagaagagaatatggaatttcaattatcttcatttctcacaacatttcggttatagctaaattctgtgactatatttatattatgtatgcaggaagaataattgaaaaaggaacaagaaaagacatctttactgatccaagacatccttatacttgagctttaatttctgcaattcctgaagacaaagatgaaagattatacacaattcaaggttctccacctgatatggctaacttgccagcaggagatccatttgctccaagaaatgattatgcactggctttagattttgaaaaagaacctcctttaatttctatatctaaaacacatgccgctgctacttgattacttcatccagatgcaccaaaagtagaattaacaaaagaattacaagctagactaaaactatttaaagaggtattaaaataatggcgcaacaaaccacattgaatgtcaaaaatttaaaaaaatatttctctaacaaattcggagttgtaaaagctgttgacaatgtaaactttagtttagaacaaggaaagattttaggtttaattggtgaatcaggatcaggaaaaacaacagtgggaagatctcttattagattatatgagtcttatggtggtcaagttactttattagatgaagttatttcaggaaataaattaactaaaaaacaaaatctatttttaagaaaaaacatgcaaatgatttttcaagatccatattcttctttaaatggtcaaaaaaatatttattctattttaaaagaaccattaatagtaaatggaattttaaaagaaaaaatgaaggatatttttcaagattgacaagatgtagtaaaaaactttaagtatacatttttagaaaaatatttagatgttgatattgaaaatactttgggttataacaagaaattaaaaacttttttaggagaatttgaagaaaaagttcaactttgaaaagaacaattttctaatgtaaataaagaaaacacaaaggaaatagaagaacaatttaatgctttttttgctttcttagataaaaaacaattatttttaactcaaaactttaatgatatttataaaagagctggtgttttatataaattctattttaaaatgcaagaaaaataccgtttgggtgaaattacttttgatgaagtagaagttaaaaacacagctaaaaaattaaagcaaattcaagaagaaattaaagatattagtcatttcataagagtcaaagaaaatccagaacataatcaagaaatcgaaaaacattgagaaaactgaacaaaatataataattccaaaaacctactaaattcatatgtgtcacaatataaatatgaatataaaattaatgaacacaatgcattaatcacagatgatcttgaacagtattcatactataaaaggctttccattgttaactatgaaatttatagttatttaaaattacattttaataaatttgctaatttaacatattcaaaaattgatgattttatttacatttttgaaaacacaaaagaagaatttttacttcaaaatcaaagagttttattagctcaaaaaacttctgaaaaattcagatcagtttcaagttttagacatgaatttattgatattcttgcaaacctagaagttactaaatttattttaaattctaaaaacaattttgagaataattacaaaaacaaaaatattattcatcttgagtcaatcattaacaaatatttaattagttttcctaaaaaagatcatgaacaaaaatctcgtttagagaatcaattaaaagaagttactaaagagcatgaagatgctaaaaatgtttttgaagaagaaacaaagagattcgtagctgaattttctttggttcaaaaaagaaaagaagcgcaattagctaatttaattcaacaaaacaaagaactaaaagaaaaagtagcacaacttgaaaaagaagttttagaactaaatcaaaaattacttgaaacaattaaaagagatgaagatctttttaatagacaaaaaaatagatttaaagaaaagcaagatattattaagtcattttctattgaaaataaaaatatttcaaacatttatagaaacataagattattttttggtatagaacaagcaatttcaatttgtcttctaaaaagaaggataaaaaaattcataacaagtgaattaatttatgaagcactcgaaagtgtaggtctgttaagacaatttgcttatagatatcctcatgaattttcaggtggtcaaagacaaagaattgttattgcaagagcattaattgttgaaccaaaagttttaattgctgatgaaccaatagcttctctagatatttcaattcaagcccaagttgttaaccttctaaaaaaattagttgaagaaaaaaatctatgtatgattttcattgcacacgatttatcaattgttgaatacctagtagatgaagttgttattttacatacaggaaaaattgtagaaagaggaaaaacagatttagtttataataacccaatccatccttatacaaaaaatctccttgaatctgtacctaaaatgtcaaatgcacatattccttttaaacctcttccgtttgtaaattcatatttaagtgaacaagaatttccaaacaaaatagtttctcaaaaagttgaagaaaatcactacgtatttggaacacaaaaacaaattaatgagtgacttaaagaagtataattaatgtatgtctaaagaaacatttacttcatttttaaaaacaaaaattgttagagattttaataaattttctatagtttgaatagtattttgaagcattgtttgcattgttttgtatttagttttagtttttgctaaagaaagtaaatgatacgatgcacaatcaatgatcggacttttattaatctgtgtgagtgctttttcaacggttttaagattaggattttttaacagctattcaaaaacttataaaaattgaaaaatctcttcagaaaataaaatgcgaagagaaaatcaattaccagaaatagaaaaagtcgatgacaatatacttaaagctgagagacaaaaaaaatctttaatccctatattattaggttttgttgtgggtttaatattaataatcattgcattaccttttttcaattcataatataaaaaaatattcaagatttttcttgaatattttttattttttcttcaaaaatgaagcaaatttataatttataaatgttagaataattttttatacggttaataaattttgtaatttcttgaattttcacttctttttttaagttttcaattaacatctgttcaatttgattaagattatataaagaagaaataaaaatctttttattttccttaattctactatctaaaacagggtttaaaacttgttcaataaatcaagaaacatcattagaaataataaaatcttcaattaaaagatagtctgcttttttcagtttatttactatatcaaacactacaccttttttggaaatagaatgtgagtataaatttaataaatctaaaaaattagtataaattattgttttttcttttgaaactatacttcaagctaatattttaaaaaaagcagttttgcctgataaagaaggtccataaataaaacttcactttttatttttcggaacttcttttcataatacagataatttttgttttacttcattattaacttgctttaagaaattttctttaaaactaactgttaaattatcaaaagaaatttgagaaatttcttttaataaaatatatttttctaaactatcggattttcctatttcagactcaattagctttatttttaaagcatttgttcttgaatctcttataatgatttttttaaacttagcattaggttcttggtctaagaaattcaagaaaatatcaatattattattaatttcttgttcactaatgttaagtttgctaacaattttttgaacttccggttcagtagttaccttttctataaaaaattcttttattttttcaaaatcatcttgattagttgcaggcacaacatcttttaaagagattttattagtcttcattttatcattccgtttcttctacttcttttagaaaatcatctattgtgttttctttgttttctgcttcgattgaaacacccattgtttcaaaaggttcaaataatggtttcggtttagaatttaatttttgtttatattcaaatttttcaagtaattcttgataaacttcatggtgtagaattatttttttactatataaatctttagcaattttttcaaaatattgaaaattaattttattgtttattttatagcaataatctaatatttcgtttaatgcatgaaaagaaaatccctgttgatgatagtgttctacttttttttctaaactaggcattggttgcctgtgtgttaaatattctatatatcttttactgtttaatacttgctttgcttcaatattgctttttatgtcatttatgtgaacttcttctttaatattatcagaaataaatatttgaaaaaaatttgtagatacttcagaaaaaccttcttttttatagtctttttcagaaaatctttcaataagttcttcaaatttattttttccaattttcttaattaacaaatcactaaagtaactgttttttagaatttgtgtaactgtagaaggttttttcagttcaattaaaacaattttttcctcttcattataaaaagttctaatcaaacctattgcttctaaaatctttttatttttttcaaaaattactttatcaatcttaaatataggttctaaatcacttaaattcaaaaattcttttttttcgttaaaaaattcaaaatcataaaagtaattaaacaaaatgtatgcttctttttcaattataggtaaataaaaaaacctgataagtctaaagtcttcttggcttatattttttgttccaaatattaaatattttttattcataaaatctcccttttatttatttcattaattttataaacttttatttaatttagaaaaaaatttaggaaaaaagtcttcatttttccagtcactattacagatattaacatccactctatcaaaaaatcctttatttaagaagtcatttaagctagaaattgagttattaacatttttatttaaaatgtttttaacacgctgttcttcagaagaataaatgttaataacaccatcaaaataaattgtaaaattagcatttttagtaaacaaatttggaatttctacaaaatcatatttattatttcttaaatgctgttccaaaaatggatatacaagtttttcaatgacattaatattatcaatatttgatcttataaattctcttaatttctctttatttacttgatttgtttcaacaaaagaaggattataattttttaaagctaaaaaacaaggttcattttttaaatagcatttttgaaaaaattcatcagaaaataaaattttttgttccttttttaacacttttttactgtaatcttgaagtaaatttaaaaaagtagttttaccaacagcatattttccaataacagcatacatttttggtttatttttcattattgttttcttcttttcttaaaattttagctactgcagaatattttatttttccatctactttatcagcaattttttgtaaatttttagaacctgattttaaagcaataagttgccctgcaatgttttttgttgaagcatcattcattgaatctccaatatgaacagtatttttaagatttatattttctaaagcagcaataaattttatcacttctcctttagaagcaggtttagatgttatttctatagctctaccctttgcaaccaaagctaaatttaaaaatccttcatatttgttcttgatttgtttaaatacaatctcaatattatttgtagaaaaagacataagtaaaatttttttagcagttttgactttaaaagttttaaaactttcagcttttaaacttgttataaaagctaaaattttacttcttattccttcaccaaataatattttttcagtatcagttgaaaaacaaatattattattttgtgctatttcaaaaacttcttttaccactatttcattaatatcttcagatttaagaacgctttgattatcagtttgtaaaattaaagcaccatttaaacaagcaatgtatttagcaccaattttctttgaaatattttgaacttttgaagagtattttctccctgttgaaataacaattatgtttttcttggaagcttttaaaactgcttgttcatttcgtttgctcattttagctgaacgaccataacccgaatctagcaatgtcccatctaaatcgataaaaaaaatttttttctttaacatattgaatataattatataaatatagttataaaacataaaaataaggagaaataaaatggattttttaacaaaagattattcaacatttgttgttatggcagttctttgagcaattatttttcttatttttctaatagtagaattgctaacaacaggagtttgatctggattaatttcagtgtctacaataattccatttattttagcaataacaacagatggtcaaggttgatcagttacactacaattgattttatttattgttttgttcctaattttatatttttctttatttaaatttttaaaacgtatttttaacaaaacaaaatatgatggtccagttttagagctttttgatttagatcctatccctcttactcatacaacttatgaaaagggatttgaagagacaaagtatggacaaataaatgttcaaggtaaaatttatagaaccttgtcagagaaaggacaaggtactatttctgaaggaacttttgtcaaaatagttcgaatagaaggaacaacattaattgttaaaaaagcaatacaaaaaggagaataatgtcaacagcaggcttagtaatattaatattttttataatcattcttgttgttttagcaataattttagtatcaagaattagaattattcctcaatcacatttttatattgttgaaagattaggaaaatatcatagaactattcaaaatggactacatttcatttgaccgtttttagaaagaataagtttaaaagaaaactgaaaagaaaaagtttacgattttccagcacaagatattattactaaagataatgcaaatatcaaggttgattcagttgtatttttacaaattacagatcctaaactctttgcatatggagctgaaaaacctataaaagctatagaaaatctttcagcaactactttaagaaacttattaggtgatctagagttagacgaaacattaacttcaagagatactataaatttaaagctaactcaaattttagatactgcttcagatgcttgaggaattaaagttcacagagtagagattaaaaatataattccacctaaagatatccaaaatgcaatggaaaaacaaatgagagcagagagagaaaaaagagctaacattttagaagctgaaggttcaaaaacagcaaaaattttagaagctgaagctttcaaacaatcttcaattcttgaagcagaaggtaaaaaacaagctgcaattctagctgcggaagcagaaaaagaatcacagattttaaaagcagcaggaactaaagaagctattgaattattaaatagttcaaatgtaaaaagagaagttcttgtactaaaatctattgaacaattaggaacacttgctaacggaaaagcaacaaaaattattattccaccaaatttatctaatgttgcatcaacaatggcaacagtttcagagttattcaaagaagaaaaatcaagtcaaaacaaataatttttgcaaaagacttaataatttttaagtcttttgtttttttattgtcttgtatgctttaaaattaacaaaaatttagtaaaattttataacttaattaattttaaaaaaagagaaggattatgagtaaatttaatttattacaaaaaattgctcgtcttaactcaaaagaaaacaacaataatccaaaagataaaaaatcaaaaaagcctatttctaagaaaagaaaaatggtttattcagctattggaattggaagttttattttgattttgggattgggaattggagttccagttagcgcatctagcacttcaggttctttaattcagcaaagagcagattcagatgttttagtaagtattgcgacaccttcaggtgagcaaaatattttagcttcacaacttttaaaagctattaaatcaacaggtgaagaacaaaacgaagaattaaaacaagcaaagaaaaaaattgttgaatacctttacgatcaagaagtaaaaaatgcagagctatttcaaaaagcttgaaatgattctaactcagataaaacttcaaacaattcaagaacttttactataagaagtcaacaagaagtaagaactgaacaagaaaacagactaaaagatgaaagagcaagattccaaaaaaacttcggatttaacaattgagaaactgagtttaataaggaattaacaactgaaaaatacggaaatgcaaaaacatttgaagatgcagttgattatttaacatttcaggctttaattcctgttgctttttcacgttttaaatttgagtttaatacttcatttacaaattcagatgtaactaacagagtgctaaaaaatgatattaaagacgattcaggtcgcgttgttttccaccaaggagatagactgtttaaaaatatcataaatttatcaactaaagaaggtgaagattttattaatggttttttacctaacattaaaaatccaaaagatgaaaatcaaaaaccagaagatatagaaaaaaacaaagaaaatcaaacagtagcagcatttttaagtaaatcatttgttaaagattatatgtatcctaaaaaattatttgatgaaatttacttcaatgatggagcaattttaaaagataactttgaattatttgatatgtccaaaatagttgtaaatgttaaaactgatgataaaaattcacaatcagcttgaaaaattgctaaagccgatcttgaacaattattaacttatttcttggttgaggttcaagaagacggattaaaagctaaagtaatcagaaatggtttagaatctttagaatcctttaaaaaagaagaagaatcatataaaactaatcaagaagacaaaattttactaacaactattaatccttcagttaacaaacaaactgctgatacttttggaaaattacctcttcaaaatctgagtcaaatttttgaaaataactctgttccatttggactttctttcttagataaactttttactccaaaatccacaactcaaattctttccaaaacattatttgacaaaattaaatctgaagtctttaaaaataatgaaaacttgcttccagaatcaagtactttagtcggaaaaaccgttgcagaaattaaagaaatcaaccgccgcttaaaagactttatagaaaaattaagtgatacagaactaaacaaagcaggtgaagcatttagaaacacttttggggaacaaacaaacaacttcagaattcattatagttatactttaactgataatccaaacataaaaattgtttttgatgataaaggaatgcaaattctcaaagtatcacaaattaaaacctgagatgcttttgatcaaataattcataaagaattacaactaaaagcaaacaatcaatttgataataaaataaactctaatattaatctttcttctttactatctgaagtacaaaacgatgattttgctttatattcttcaataaaagacaaaaaatttcaagatgtgttattaaatgataagttaagaacagaacaacaaaaacaagaatatcttaaaaacattactgacttatcaaataattttttagtttcatttgtaattaacaaagttttaaaaataaactcaaatgtacaaacttatctcaaaaaagagttggaaaatagattagttgatgattatgtatttaatgatcaacaaaaattctgagcagtaaaaacacagatggataaaaaagcttctcaagcaatactagatgagttacaaacttgatttaagttaggaaataattaggaaaaatgatgaaaaaaataagtaaactaaaatgacttttaactcctgctgtaggattttcagcaattacttttatttcatgtagctataatgtggaaagtccagaaagaattgaagaagataaaaaattacaagacaaaattgtacaaagatatgttgacaatgcttttgtagaaactattttagctcaaagagtctataaaatccagccaactgctatagcatctaacttcaacgataccaactcagaattttttaaagacgcacaacaagcttttaatttttatcaaaattaccaattaaaacaagatgaaaattttacttatactacttattctaaattattaaaagatcaagttttaaagtcaaatgattttagagtacttcaagaagacttgggttcaggaaacaaattttccactccttcttttaaaattctttataataattttgatacaggaattgctgaaattattaacaaattacttttaaccaaacactttttactaggtcaagaagaaaacgatattaaaaactcaaaaatatacaaagaatctactagtgataaagcttcttttacaacaaaaaatatttttgaaagtttagatccaagtgacaaagacttcttcttaatgaagcttttattagaaaaacaaccagctcaagtttgaaaatttgaatcctcagacggtcttgatttagcaacttttgctgcaactcaagttaaagacgcaaaatccttcaactctatagtacttgcagatgcaaaactagattctaaaactacacaaaaacaagaaaattttgagtttctacaagcaaatgattcaatagatttacataatttatttggttatcaaggaattttatacaatcaaggtgttagttcaagaaacgatttagattattcgatttctcatcttcaaagtgaatttaaaataaaatcaggatttttagatgctaacaacaacatttttagtcaagatcaattaagtttatttgacaagtgaaatcaagtaaaattagcacctataaaattaaagacaacttttgatactaacaaggaaaaagaagaactttcatcatcagatatagaaattcaagctgatcaaaattcattaacttatgcaacttacgaagtagataaaatttatccttcccttgtttcttcaaacaaaaaaagtgctcaagttgtaattaaaataacaatcaaatctgataatgcaaacttaaaagataaaagctatttctacacagtaacagtagattgaaataacaaagacaacataacttatagtccacaaatcaaccaagatggacaaaaactatcacaagaaataccagcaagtatttcttctctttcttccgatgcttcaaaaattagcattagttatgtaaacaaaattgttcctttgtttgacaaagtagtaaaagatgataacaagaaagaaacaaaaagatacttttctttagataatactccttgatctactttagaacaaaaagaaatccttgctttttctttatttttagcagatcaaaatcttatttttaatgatgtaaaaacttactttgaagatatgggttatataatcaatgttaaagataaagtaattaaattagaagattctaaagataaaaaagataataaaaaataattaaaaaactttagttttaatataatttaacttatgaaaacttgacaagaagaattatttttaaaaattattaaaagagaagaaccagcaactattttgtatgaagatgataaagtaatagcatttttagataaatacgcacatacaaaaggacattttttagtagtaccaaaagtttattctagaaatttatacacaattaccgacgcagatttatcatacttaattctaaaagctagagaatttgctttaaaagaagtacaaaaactaggtgccacaggctttaaattacttatcaacaatgaacctgacgctgaacagtcaattttccacactcacgttcacattattccttactataaaaaataacttcaaaaatcaacatattttaaaaagtaatgcaaaaatttaatttgtattactttttttgtataatattacaaacaggggtgctgtaaaaggctgagaaatactctaaaagttgatctaggtaatactagcgtaacgagtttattttttgtttatattttttataagctatctctgtttataacacaataaaggaggtagcttttttgctcaaaaaacttaaaaatttaattttatttacttctatttttactccagcaatatttgccatttcttgtggaaatacagataaaaacgaaaaaccaactccaactccagatcctggaacacctgttgaaactccaacaccaattgtttcaccggcagactgagacaagaccattaccattggaatttctcaagcttgacttaacaagaaacaaggtgatgcttttcctaacaaagaaaaaattggctcttttttacaaaattttaaagcagaatttgataggttaaaaaatgcagatgaaaatgctaaaaattatccagatgttaactttatagtttcaccagttcaagattcaacaatattattaactaatttacaaactgataataaaaatcttgattttggtattagtgcttccggaaaacttgtagaattcttaaaaactaatccagatgttgtgactccagcattagaaactacaacaaactctttcacctttgataaggaaaaagaaaaattttatgttgatggttcagaaacagatccacttgtaaaaattgctaaagaaataaacaaaatatttgttgatacaccttatgcaaattgaacagatgaagaccataaatgaaatggcagtgtatatcaaacactttatgatccttcagtgcaagctaatttttatagaggtatgatttgaataaaaggagatgaaactactcgtacaaatatcaaaaaagcttgaaatgaaaagaactgagaaacctttagaaactatggaatccttcacggtaaagacaattcctcaagtaaatttaaactagaagaaacaattctaaaaaaccattttcaaggcaaatttactacattaaacgaagatagaactgcacatcctgataaatacaaactaaaatctgcagatacattaggagaacaagaaaatttccacattgcattttcagaagaaggttcttttgcttgaacacataataaagcagaaactaaaccttttttaacaaaagacaatgaaaaaattgaagctttaatagtaacaaatccaatttcatatgatattggtatatttagaaagagtgtcaataaactagagcaagatttaattgttcagacttttattaatttagctaaaaataaacaagatacatatggaccacttttggggtataatggttataaaaaaatcaacaatttccaaagagatattgtagaagtttatgaaaaagccattaaataaattagaaatcaataacttaacttttaaaaacaaaaatgataattatattattctgaaaaatttaaatttaaacttaaattcagataaagttttatttttgcttggttcttctggtcaaggaaaaagttctttattaaaaacaattttgaagcaaactgatattatttcaggaacaattttattcaataatcaaaacatttttcaactaaataaaaaagattgaaaatccttcttaaaagaagtaagttacttgaatcaaaccacaacttcgattccttttgaaacagtttttactaatattacaaggtcgattcaagaatacaaaaatgtagtctttaatcttttcaacttagctacaaaatctcaaaaagaagagataatttcaatattaaaagaactaaatattttagataaaatttatcacagagtagattcactttcaggtggtcaacaacaaagagtggaaattgcaaaattaatgatacaaaaaccaaaaattattttagctgatgaacctacaaactttttagaccctgaaacttcgaaaaatataatagaattattgataaaaatggcaaaaaaatttaactcaattttgattatagtaactcacaacaccaatcttgttgaacagtttgattcttcaattttgttgataaaaaatcaagaatatcatttttatgaatctaataaacaaatgaattctactattttagaacaggtttttaaaaatgattaaagaaaatttattttttgaatgaatagataaaaataacaagaaaataaaattaaaatgaaaaattttaattttatttcttttattttctctctttgttttttctttctattcactttatgaaccaataaatagtgggtcaacaaaaatctttacaaaaaacttaaaagatttgtttacattttccaattattccaaaaaatatccaagttgaagcctttgacaactaagttgatattatatgtttttaacagttcgttattgtatattgggaacaacattaggttttatttttgctttttttacttcttttattagttcaaattttcaaaaatacaaagccattagatgaagtatttccgcagtagttctttttttaaaagcctttccaatttctttatttgtatattttttctcagtaggttttgataaagaattagcagcaacattaattttattttggtttagttggctctgaatgcacaagtatttttttgattttttaaataatttagatttaactacatacaaaattatgtatatgaaaaccaatgataatttttcttcatttagaaaaacattattaccttatataataaataaatattttatgttctttgtttattctttggagagtaatattcgttgaacaacaataatcaatgcagctggtgttattggaattggtttacttctaaatgatgcaagagatttttctttaggttgatcagtagttggttttccgttattggtaattttaattacaacaatattttttgaatttttaagtttatttttaaataaagtaattttaaatgttaaaaatttagattacaaaaatacttcatttttgtggctaaaattaaattttagaagaatttttaaatgaatttttgtcttgttttttatagcatttaatatatatgcaattgttcaggtttcttcgttttctacatatccaaatcatattaaaaatttctgacagcatttttttagcttcaaaaaagaagtattttcaagcaacaaagaagataatccattttattgaattttaattttaatctatcagtgtgtgttgtcaatcacaataatagcaatagtttctttgtgcttctcaatcttaggaaatgaaaaattaaatagatgagttcaatgagttccacttcgttttttaaacacattatttagaataattccaacaataatttttatttatttattttcgatattttgaataggaacaaacatttttttactcactgcaataataacagctctacacaaatcaacaagtttagtaaagcaattaaacgaaagcattaattctataaattgagaaatatacaaaactttggaaatacaaggaaaaagtaaatttcaaagaataatcaaatttgtaattccctccattaagaaagacttttattcatttttactattttactttgaaaatcaagtccaaacacttattttattaggttcagttggaggttctttattgggttccaaaattagtattgtcggacaagccggagaaagaactgaagatattgcacagctttttacctattcttgagtcagttgaatatttatagcaataatacagtttttacaattttactttaatttaaaagttcaaaataaaaaattagtcgaatattatttcagaaaaatatttaataatatcaaaacgaaattaacttaaataaaaacaaaaaacaacgaaatcaattcgttgtttttattatgataattttaacaattattttttcactggctttttagaagcaggtttagaagcaggttgtttagtttgtgaagtagcttcttttttagtatttttctttacagaagattctgtgtttgacttagtttgttttacttcttttttatcagcagatttagcggtttttacttctttttctgaagaaactttagaagattttgttgaattatattcaattaatttatctaatacttttgaatttgtgatatttacttgtaattgtgcaagagggaatgttttcttaatatcttcaattgattttccgtagaatttagcaagttttccatattcaatatcataatcagctgcagttgcaaatattttctctaacttagcaatttcagcataaataaaagcattttttagtaaattaatagattcagttctcatttgaagtttaatgtcttcttcagtaaatttagtaatttctaaatattcttttacagtaaaaccttgtgattttaaattattttcaaataatttttctagtcttctaatttcatttaaaagtaatttttctgatataggaatttgaacttgtttttgaatttcagcaaatgattctttttgaaatataactctattttgttctagtttttcattaaatgttaatttttctaaatatgctcttaaatctttttcattttttacatcttctagacttaattttttaataaattcttcatctaatttaggtaaaactaactcatttacttgattaattttaattttgaatttagcttcttttccagcataagctgttacgtgataattttcagggaaagttactgtgatttcctttttatcaccttttttcataccaactaattggtcttcaaaaccagctataaaacttcctgaaccaatttttaaatcaaagttttctgcttctccaccttcaaaagcttgtccatcgataaaacctttaaaattgaagtttacaatatctctttttttaataggtttatcagtttcttgagttgcagcgctagtttctaataatctttgaatttgtaaatctatatcttctttaccaactttaggttcaataaatttagtttttaaatgtttataatcaggtaaatttaaagttggatatacaggatataaaaaactaatttctaaatttgaagtagaaatatcttcgattttatagataggactatctaaaacgttgtcatcttcaataatattttttcttgcttcagtttctaattcaggtgcaattaatgaaactgcctctcttaaaatagatgcttcagaaatatattttttagcaatattagcaggaacgcttccttttctaaatccatcaacttttaaatttttaattaaagctttatttgctttttcttgagttttctttcaaacattttcttctggtttaactgtaatttttaattctgatgattcagctagtagttctctttttaccattttttctccagtctaactaatagttttgcattagtttttagtatttaatattttaacaaattacttcattttataaagtaaaatttactatttttttcaatttacttaaagcaaatttaattgatttttctgtaacttgttttcttgatcctttaaaattctgttctcaaactttatcattaatagctataaaaacttgacctacttttgttccaacttcagcggtaggtcctgcatttcctgtgaaagaaacacaaaatgtagtattaaaaaattttttacctttttttgccatttctaaagctgtttttttgtttacaaccccgtttgatgtgtctatatttaatttttgttttatttcatttgtgtaagttattaaaccacctttaaaatactttgaagcaccaggagttgagactatttttgcggtaaaacctccacctgtaaatgattctacacatgaaattgtttgaactgtgttttcaagttctcaatcttgttttgtaaataaaaattttcttctacaaaattggcaaataagttcaatttttctttgtttttgaaggattttttctatatcttccctacttaatactttaagtaaatttttagttttttctcttgaacaaccacatttgtattttcaaaatttagtgtctaatacttcgatatccagcttggacgaaaaagattctaaacctaaaatttcaaaaggattttcttttaaaaatgtttctaatcaagcaatatcattttcactgtgttgtggtagtaattgaaaaattacagattgagcttgtaaaatattaccacttttgtcgatttttaaataaagcttagccacagaatgaacttgctcagataaataaaaataaaaagctaaatctgaaataagatcaccactttgtaaatctacttgtccaccataattttgttcttgttttgtgcttactatttttataaatccgtttttagttatagatttttgaagcaaatccagataattaatttttgaaaaatccttgatttctgaagcaaattcattgtatttaaacattgctctaatagtttgatttgaatttgaatcaattattaaagaatcaattgtatctgttttaattaaagtagtagttttgtcatttttaggatttaaaacaactaaaagtggaccaaataaagctacagcgctagctaaaataatagaaggaatttgtctagtattttgcactttaatgatattttgtgccacttcagtaaaatctgataaaaatactctaaagttatttttaatggcaatttgtgtatatgatttattcatataaattccttaaaatattaaaataagaagtaaaactacttcttattttaatatgtattttctataatttcttaaaataaaaattattttttagcaaaatgtaaagcaactcttacatattgagcaacaaatgaagattcattgtcatatcatgtgtaaactttgtataatctttttccatttacatcaacaaacttagttaatgttgcatcgaaaattgaaccatgtgtgttgttaataatatctgaagatacaatttgatcttcattgtattggaatgattcgttttcaactcttttcatttcagcgttaatttcttctatagtaggatttgattttaattcaactgataagtcaacgaatgaaccagtaataacaggaactctaatagcaattccatctaattttcctgttaatgaaggaacaactaatcctatagcttttgctgctcctgtagaagaaggaacgatattaaatgctgctgctcttgctcttcttaagtctctgtgtggtgaatcttgtaatttttggtcagctgtataagcgtgcacagttgtcataaatccatgactgattccgaattttttatctaaaaagtgaactaaaggagctaaagcatttgttgtacaagaagctgcagaaattattttatcttctgaagtaatttgttcatggttaacattgtaaacaatagttttaacatcatttccagctggtgctgaaattaatactttcttagctcctgtttttaagtgtttttcacttccttctcttgatgtaaagaatcctgttgattcaaatactaagtcaatacctaattttcctcaaggtaagttttctgggtctctttcagcaaaaatttgaatctcgtgtccattaataactaatttatcttcgcctcttgtttcaacagtacctttaaaagttccatgtgctgagtcatatttgaataaatcctttaaaactgaagcacttgttaagtcattaattgctacaacttgaatttcttttgtatcaatttcaactattcttcttaaaattaatctaccgattcttccgaatccgtttatagctatttttttcatttttttcctttgattttatagtatttaagtaaaaattcttgttaaaaagaacttattaaattatactcttttttaattttaaaataatatatttcttatcaaaaaacagtccaattatagactgttttaaaaaattaattttcttttacttctgcttcgattggattgtcatctgatgaagtatcagaagtatttgcttgttgtgctgcggcttgtgcaaaagcttgtgcagcttgttcaatttgatctaattttgtttttagttcttcaaatttttcttcttttaacaagtcttttagttcttgaatttgtttttctaaagtttctttttgttttgcatctactttatcaccttgatcagtaatagatttttcaagttggttaattaatgcttcggctctaactgtaatttcaattttttcttttttcttagtatctgcttcacgattttcttcagcttcttttaccattctttgaatttcttcttcagatagagtagttgtgtttttaatagtaatagtttgttctttatttgtctttttatctttagctgaaacagttgttataccattaacatcgatagaaaaactaacttcaatttgaggaactcctctaggtgcttgttcaattccagaaagattaaatcttcctaataatttattatcagcagctagttgtctttctccttgaactacagaaattgttacttctgtttggttgttttcagcagttgaaaaaatctgtgatttagttacagggattgttgtgtttcttggaattaatggtgttgcaataccacctaatgtttcaattcctaaagttaatggagtaacgtcaagtaataaaacatcgttgatttctcctgctaaaactcccccttgaattgcagcaccgatagcaacaacttcgtctgggttaattgatctatttggttttttacctaatgtgtgttcaatcattgcttgtacagctggaattcttgttgatccaccaactaacaatacttcatctaaatcttttgcttctaattttgcttcttttaaagcatccataattggttttcttgttctatcaactaaatgagctgtcattttttcaaattcagatctttttagttctaattcaacgttaataggtccgtttggtccaattcctaaaaatggtaaggaaattgtagcaactgattgatttgataaagaaatttttgttttttctgcttcttcttttaaacgagataaagccattttgtcttttgaaggatcaaaatcatattcttttttaattttgtcaactagtcaatcaacaataacgtggtctcagtcatcaccacctaatttgttatctccacttgttgaaagaacttcaaatgttccccctgaaagttcaagtacagaaacgtcaaatgttcctccacctaagtcgtatactaaaactttcatttctttgtcagacttgtctaatccaaaagctaaagctgcagctgttggttcattaataattctttcaacttctaatccagcaatttttcctgcattttttgtagcttctctttgcgcattatcaaagtaagctggaactgttataactgcttttgaaattttgtgaccaatttttttctctgcatattcttttaaataagaaagaatttttgcagaaatttcttctggtttgtattcttttccgttagcttttactgtttgagatgttcccattagtcttttaattgaagcaattgcatcaggatttgtttctaattgtcttttagcagcatctcctacaatttcttctccgtttttaaatgcaacaacagaaggagttgtgttttttccgtttggattttctaaaacgattggttttccattttctataatagaaactacagagtttgtagttcctaagtctatacctaaaattatttcttttgccattttgtcgctccttataatctatctattttataactttgtattgatttaaattcttatgacagcaatagtataacacaaaaaatggcactcacaagtaaaaagtgccatttttttaattattaaactttttgttctatttttcctaattttttcctttattcggaaagtaaattaagtatctgcataaataaataattaaaaccaattcgtgaattagtgtgatttaaaaataagtcttcattatttttagtaagtaaaacaacatctgattttttagccatcatagaatctttatttgctgtaaataaaatagttttaatgttgcctttttgtttaatttcagtaaaaattttttcaatatttggtgttaatgaagaaaaagaaaagaaaatacataatgaattttcattagctttttctactcattttttctgaacatctaaatcaaaagaataatcgacaaaataatttagttttgatagataatttgcatagacattaataacagctaaatttgccccacgaccgaaaagtaaaatatatttgtatcgttttaatagctccacagcttttaaaatagattcttgatttacttcaaaaatatagtcaagatttgactttattaagttgtgatattttagatatcttaaatttttttccaaaggttttttacaagtatcagaagagacaccataaaatttaagttgctgttttaattcaggtaaaaagtcttttactcctttgtatcccaaatattttataaatttagaaacagaaccattcgaaacgtctgaattttttgaaatttgtccaattttcatagtgtctatattatttaaattagataacaaataagatgcaatgtgagaaaaaaccaagttatctgtgctgttttttacatcttctaattttttaagaatattttccatataacctctattgataactaaattttagcccttttttagtgatagtgaaacaatataatattaattatatgtagaatttaaatcaagaggtcttcaaatattatttttttgtttaatacaaacgtataaactgttcttaaagtcttcattttcttcaaaattttctatttcttcaaaatttgataaagcaatagtaaatattctgtaatagataattaaatactttctaaagtgtgtaaaatttagtattcaaaagcatactaaaaaaagtaaaaacagtattaaaataattgaaaatgattgtgattctaagtagaattctaatatagaaccatcgctagcttctacaaaatcaaaaataaaaaattgtagaactgtttctagtataacgaatgttccaaatattcaagttccaagtaacaaaacagaagaagtaattgtcattacaaataaatttttatatatttttttaatttcttcaaaataatttattttatagtcttttaatctaaaatcattaataaataagttaatttcttttaaagaatgtgtttcattgctcacaaaatcagttaatttattttttttaaatatactcaataatatcgacccattatagaaataatcaaatttagaaattttaattcctttattttcttcaaattcttcaaattcttttcataaattattttttaccaaaaattcttgttgaacaaatttattttcaaaatgtaaggataaaccttctaaaaaaagattattttgtttaaatatttttttgctttttcacccaaataaaataacaaaaataaaagaaaaaaaagaaacaacaaaaaatataatagacaaaatatttataaatctaacgggaaaaccaatttcagttaatattgattcatttctatttacataaggttttaaacggaattcaaaaacaagagccaatgctaaaaaataagaaaaaaaagagaaaaaaattataaaaagtaagtaaataaacttgtttctttttatttttcaattaaaaaaaagaatgtatttaaaaattttttcatttttcatcatatttaactataacgtttaatttgataagttattgcaatagtagacacaactgatattccacttactagattgtccataatattaataattactcctaaaggatttgcaaaagaagtagttaataatattgatcttttaagacctatagaaattcccattttttctaagactttagaagcaccaaaaaaagtttttttaaatactgatttcattataatttcttttatcgctttttcttcgacgaattttcctaaaatttttgacataactttgttatataacttatcaactatgaatttagctaactttcttatagcagaagttttagttgcgaaatttaatacattataaacgaaagaaaaatccagtacttttgctaacaattccttttttaattcacctttaaattcattatatgtcattccagaaaatttacggattttttgatattcagatgaatttttgaattctttaattttatctaagtcagctttcattgctctttccgtttcaaaggattcgtgaacaaaatatgtcattatagaagactgcaatgctgctcctgctgcaagaggcgcagttgcaccaaaagttcaaaaactagaaatagaataagtaaaaacgagagctcaagaaacaccagctataactgcagaagttatatttaaaccatgatttatatcatataaagtctggtatttttctacaaaataattaaattttttcaaagtatcttgtgtctcattttttaattttaaaaatttgtcttttacttcaggatcgtttaaagcttcttcaatcaatttttctttatctttatttgttacatttttgttagaagtaatcttttcatttaaattagaatcattttgattatataattcagctaaattttcattatcttgatcttcaaaattatcatatgttgatgtttgttgatcctcatcatcaagatttagttttaaatattgtgcatattgatttttaatttctgttaagtcaatttgtttatttttaattaaatttaaatttttgtaaaattcttctttaaatttatttttttcataattattgctgaaattttttatataactatttaataatatttctgtttctttgaattgagaaaaatctacaaattgaatcacatcttgtacttgttcaaaatattcatcaactttagcatctcaaattagattttctgatttacttataggaatataatctgaaatagttccatctattaatggttgaacttggagagtttgaggtactttatctatattaatattcgcatattgatatataggagatacaatgcttggaatttgtgataaattacctaaatcgaataatatttttttcatatttaccttcttagttatttattatttttgctatttcatcaattagctttaattttgtttctagatgaattttgatactttcttttatagtgaaataagaagattcttttactataatattaaaaatgcttagacctgaataaggacttcaaaaatacatcttaccatctttttctttataaaatttaaaacctttatcttctaatatattttttttattttcattcattgattcagaatttacaattaaaaagttttcattttcataaacacgaaaattagatgaaatttttgaatattttaaataaaaaacaaaattatttacagttgttattttaaaatgtgaagacatattagcaagtcgaaaaacaaaaacttcaaaaaaatctttatcgtctttttttaaagattctcacacttttgtgttcattttttttataaataactcatgattagaaaaatcagtttcaaatgtttttatataattaaaattccattcagtttcgttaaccatcttgttcatagatcagttattaaaatctaaatcatattttttatttggaatcgatttatacaaaatattccaaatgaaacaaaaaacaattgaaataatagccatacttagagcagtaagtaaaagccgagaaattgcgtaatccgttattggatcagagctgcgattagctttatagagaattaaagatattattaaaaatggaaaaagaactaatgcgctaaaaaaagatgaataataaaagaaattaaaaacataattcagaactttattttcaaatctaaaatggacaagtctttttcttcatttattcaatttgtatttaaataaaatttcatctaaaaaatcttctggtattttgttttttttatttttcatttcttaaattatatattaattaaatttctagctttctataatgtctacaaattttttgatatattttactttattttctatactcaaaattaaaaattttaaaacatttttgtaagttaatctttctatattaaattcaaaaacatttaatgaaccaaatggagtttcaaaactaatattttcttcattttcttcaaacagtataaaattattttcttctaaaatccttcttttttcttcatttatttttaatttattaaattctacagttgctatcattttataagatttgttaagctgaggcgtttgtgtattttttaaataaaaaataaaatcattattagttgttaatttaaaacaactttccatatatgtataattaaaagaataaacttcagaaaacattttttttaaattaaaatcaatattatgtaatggatttagttctgctcttttttttaataattgtagtctttcaatttcttctgtttcaatactttttataaaagaaaaattatttactaaaatatcgttaatttgcttcatagatttttcattaaaatctaataaaatcttctttttgtttatttttacaataattgaaactaaaattaaaaaaattattaatataaaaatcaaagaataaaaagatataaccatcattttattagaataattgtctaaaaaattagttttgttattttcttttgtattaattaataaatgcacgataatagtaataattaaataaaagcatgtagttagaattaaaacaaaaataaaaactaaaaagaaaaaaagtttatttaatttttgagactcaaattttattaaccttcatctaactagtgcagattttaatttatataaatctaaaatatcctctataatatcaatttgatcttttgaaaacataatctacgagtacttatttttcttaagaaaaattaaacccctttctctattaatacaaacaaataaagttttttttagttgttcattgttttctaattcattaatatcaactttaaatttaagatatgaaacaataagagaagaatacaagtaaaattcaattaagtctgtacaagcaacttgtcattgaataactccgaaaattaaaaatgaaaacacaagcaaacagataaaaacagtttcaaaattgcgaaaaacatacaattgttccaatttagaaatcttttctaaataagaaatacaaactgaagccacaattactgaagtaatactgtttattaaaatagcaaaactaattacacttattcaagaacaaattaaaatatatttgtgttttcttttaaggttaatatataaaacttctgaaaaatttacttttttaacaatgtttaaattaaaagtttcagataactctttactgcacatagtttcgaataaaaaatctttatattttatttttcttttagtaattaaaaatcacaaactcgaccaaataagttcgaatcaagaaatatttaaattctctttaattttataatcttgaaattcgttaaaaagttgatgaataattaaaaaatccttcttttttcaagaaacttcgcattgcaatgataagccctgcagtaaaacttggttttgctttaaaacatttttatttctaatgcaaataataattataaaaaataaaattaaaaatgctataactaaaaaactaatacttactttgttgatttttgaaataatattatctatatttgttaaattaagatcatttttcaaataaaaaatttttagtaaaaattgaagaaaaaatatttgactaacaaataaaataaaacaaataaacaaaaaagaaagtagtaaaaaacaaactttatttttcttaagtttatagtttaaaaaattaacatattttatagagtctatcataataaaatttaaaaattctttttagtttttaaagcaaaagataaattgaccattgtagtagttattgaaatagcgttatctattagtgatacaaaactaactataggatttgcaaaaattgtagtaatcataacaattcttttcgcttttataaaagaaaggtattcatcaaaaatcccactagcagcttttcaatattgcttaaaaaatattttttttatatcaatttttaaaatttcattttcataacttcttacttgttgataatatttaattttagaaaatattgaatcttttaacttatttaaaactgtttttgaagcaaatttataagaagatttattagttgcgaattttgcaaaattaaatcagaacgatacatcataagtattgttcaaaagtttctttttcatttcttttacaaattcagaataacttttttttgcaaaattatttaaaaaataaaaagtatcagagtgtcaaaaattttcaatatcttttaagtctttttgaatttctttttctgtattaaaagcaaatgctgtaaaagctccggtcacagaaccctgaagtattaaagcagttagtatcggtacaccaacggcaggagcaaaaaaagacacaaatccatatcaagccgctaaacccgcataagtagcagaaagtgctaaagacattctgttaatgttataattgatatcataaaactctttataatgtttataaaagttttttaatttttcattattttcaacaatatctttttgaatattttgaaattcgctttttgtttgaatatcattaaagattaaatccagaatatcttgtttttctttattagaaagagtatttttgaatttattacttttagaacttatgttcattcatgggttatcaataatttgatttgttctattgttcaatacctcttgattttgaatttctttttcttttgtattttttcatccagcaccatcatctgttggatttatatcaataaaggaattctcatcaaatgaattattatttataaacaaatcttgtgttgtaggatttatgccttttaataataactgtaaatctgtttcagataattgtcttgtcttaattatgtctaaagtttcatagtaaacttctttaaaaaactcttggtcttttttgtttccaattttttctaaattttgttctaaaacttcaaaaactttggaattatcagaaaaatttatatttttaacgactttttttgtgtaatttatttcttgagataattcttgaaaatcaatttcttgtaaaaactttaattctacattttgattgtttatttctgtagtactaatttgtctatgtaaatccatttcactttcaatttttgaaacttgaaattcactaatattattatcagatattaattgaacgctttgagcaacagggctcaatacacttgggatttgactaacatttccaatgtcaaaaattattttcttcatcttcttcctcctttttttattaattataattgaatttctatttatgttttatttttttatttttagtttcattttttaaaccttatattttttatttttaaaatttttttcaaaattattatttttgtttaaaattttatttactctatgagttaaaggagaagctatgtataaaaaattttcagatggaacaatagaagttattacaggtccaatgttttcaggtaaaagtgatgagttaataaaaagaattagaacattatcttttgcgaatgtcaaaactttagctgtaaaacctagaattgattctagattttctacaaacgaaatagtttctcgggcaggaacaaaaattcctacatatgttgttgaaacagtggcagatataaaacaattattcgaaaaatcaaaatataaagctattgcaatagacgaagctcaattttttgacaaagacttagtgccttatgttgaagaattagcaaatcaaggaattagagtaataattagtggattagatcaagattatttaagacgtccttttggagttatgccaagtttattagcgatggcagaacatattacaaaattacaagctatttgtgtagtttgtaaaaatgcagcttctacaacttatagaacaattaaatctaataaattaaaagtaataggtgatttagatgaatatgaagcaagatgtagaatttgtcataacaaaggtttaaataatttataaaaaaacttgtaaattatttttttctgttataatatatatacctgcaagtgtagtttaatggcagaacttcagccttccaagctgattgtgagggttcgattcccttcacttgctccatatcaaatatgaccgatgagctttatgctcatttttttattcccttttccttgttttttttttttttttttgatttaattttattagtatttgccatttttaaaataaaaaataaagaaaggactaattgtgaaatacaatttaggtgataaaaatagacctagtactccacataacaacccaaatggagcaggttatccttcaaccacaggaaatcgttccggtggaggaagaggaaataataatccaagaagataattatttcttcaaaaaaattttttcaaaagcaaatactacacttaagtttaagtatttttctatcttgaacttagaatagccacatcagtggttatttttttatttttaatctaaaattattctttttatatttactaattcaaatatagtaaaatatagcaaactaaacattaggagacgtaatatggaaattttcgaatcagttgttatagataaaattggttttcatgcaagaccagcatctaaaatagcttcaatagcatctaaatttaaatcagatattaaaataatttctggtggtaaaacaggaaatttgaaatcaataatgaacattatggctttaggtataaaacatggagctatttttaaattggaaattgttggtgaagacgaaaaagaagcaaaagaagcaattgttcaagcaatgattgacaacgaattaatttacaaattttaaaaattatgaagaaaaaagaagaactttcacacttaaatgaacttcaatttgaagttactcaaaacaataaaactgaaaaaccttttgataacgaatattacaataattatgaagaaggtatttatgttgatgttgtagatggaacaccactttttctatctattcataaatatgattcaggttctggttgaccagcttttacaacaccaattaacttaaaagatattgtagaattagacgatttttcttataagtatgcaaaaagaacagaagtacgttcaaaaaatgcagattctcatttgggtcatgttttcaacgatggacctaaagaatttggtggaagaagatattgtataaattctgcttctttaagatttatacctaaaaaagacttggaaaaagaaggttattcagaatatctaaaatattttaattaataaaaaaagatttactttttagtaaatctttttttatttcctttagttttataagttttattaagtcgtttttcaaagtaattttttaaaatcaaactaggaattatcattaaaatagaaataataataattactgctcgcaaaccattttgcccttgttctgttaatggagaactaattattaatattcaaaaagacaaagacaaaataatgctataaaatggaaaagaaaaattgaccatctttaaataaagaaacaaaattgaacatagactaacaaataatcagtaaccaaaacctattattactaaccatttatattctattacaggtggtattcaaatatcgggagacaaacacaaataaattattaaaaaaggaacaaaaatcaacaaaaaactaaagattcaatccgggatttttgttagttttttattcattattttctattttttcttgaaccatttgaagaagattttcaaattctaaagtataagaatcttgttttccatattctctgaaagtaacatttctgttttcaacttcttgatcaccaataataatctgaaacttggttttttgaatttgagcttctctgattttcttgtttattctttcatttctatcatcaaaagttacattaaatcctaagtcttctaattttttatagatttcaaatgcaaattctgagtgttttgaattttcaataggaataataacaaattgttttggacttaatcaaaaaggtaaaatacctttagtttgttctagtaaaatagaaacaaaacgttcatatgtaccgattaagcctctgtgaattaaaataggagtttctttttcgttgtcttgatttataaaggaaatatcgaattttttaggtaataaaaaatcaagttgtaaagtagaaattgtaatttcgtgatttaaaacagtcttaatttgaaagtcaattttaggaccataaaaagcagcttcacctattttttcttcgtattcaacaccaagttcttttaaaactttttctaaatcagattcagcttgatttcacatttgatcatcatcaaaaaatttctctttattttcagggtctctcttagaaaaagaaacataatttacttcaattttgaagaactttagaacttctaatatcattttgtaaaggtgtttaaactcagaaacaatttgattttttgcaacaaaaatatgaccttcagtaagaagcattgatcttactcgttctaaacctgttaaagccccagatttttcatatctataaagtcttgattgttcagaaattctataaggaagttctctataactttttttgaaagtatcaaacaaaataatgtgatgtgggcaggtcattggcctaggaattaaattttcaccttcgattttcaaagccccaaacatatcttctttgtagtgttggaaatgtcctgaaatttcataaagtttttgttcaccaaaatgaggagtaaatacttctttaaatccatattttttgtcataaaaaaggattttttccttgattttgttaacaattttcattccatcttctaaccaaacaggaaaaccttgaccaaatagtttattaaaagtaaaaagctttaattcttttcctaattttctatgatctctctcttttctttcagctaaaatatgtaaaaattcgtccaaatcttctttagtttctcaagcagttccataaattctagtaagttgttcattttccaccttacctcttcagtatgcaccagcaatacttaagagtttaaaatgcttgatttgcttcatattttcgatatgtccaccagcacaaagatcttcaaaaagtatttcattttttgttggatttactatagaaaagaaggtaatttgtttattttctgaagtaaattcatctaataattcttttttaaaaggttgagaggaaaaatctataacttttccttcagtttgttccataacaaaattattgtttgcaattttttgcatcattttttctatctttgtcaggtcatgttctgataaaggttgagaaaatttaaaatcatagtaaaaaccttcatcagttgctggaccaaatcctagctgaacatcagggaataattttataacagcgagtgctaataaatgtgaagcactatgatttaattctttgttgattttcttcattttataaacctattttttgtttaattaattttaaatgttcagaagcgacagccttagctttttctttacctaattggctatatttttcaatattatttttaactttttggtattcagtttgtatgtgaattaaaaactctttcacaacaattcctacttcgtgttttagttctttatagtttttgtctttaaagaattccaatgttttttccatttctcattcttttaaagatgaaaaaatggttagtaaatttttgacaccaggtttttcgtcacttaaataaattttgttttcagaatctgtgatagctttttgaatttttttgtaagctaattctggatcatctaaaagaaagatggctgaatttggttgttcagtagattttgacatttttttggtaggctcagttaaagacataattttagcaccaattttaggagttaaaatatccacgtctttaaattgagttttgtatttattatttaatcttatagctaaatttcttgttagttcaacgtgttgtttttgatctattccaacaggcactaaatcaggattataaagcaaaatgtcagcagccataagtgttggataagttagtagaccagttggtactgtttcagttccattatcattttttactttacttttatctttgaattgagtcattcttgataattcaccaatagacgtatgagtttgcataattcaagccaattcagagtgttcagaaacatctgattgataaaaaataattgatttctgtggatcaattccacaagctaaataaaatgcaaatatatcttttctgttttctctaagttcttcaggttttatttcaattgtaagagcatgcaaatctgctacaaaaatgtaggattcatattcttcttgcatcttcaccattgtcttaatagaacctaaataattacctaaagtaagttttcctgtggctgtaattccactcacaattctatttttcataatttaagaattttagcagaaaaggtataatttaatataaaaaggtttattatgaggaaactgtcaaaatttatatattattttttaaaaattataacttttaatcaaattacaaaatattgaaacaaaaaatatgcaaaaccaaatactacttttataacttctgataagataccatttagtttagaaaatttaatagaaatagtaggtgaaaataactttgaaaacgtagcaaatacactatcaagagttcaaatatttttaaaagaaactaaaggcttagatcttgataaaataaagaatttagaaggtatttctggtgttgttttaagccaaaaaacattaaatttaatagttggtaataatgcatcaacaatagcaacaaaattaaaagaaaggttattaaaaaatggataatatttttagcaaaactaacaaacaagaacaactcaaaggatgagaacgtttattagataatttaattaacattaaaagaaatgatagttgtttattttcgaaaatagataatactgattttttagatttagttgattttttatcacctacagattttagaaaaatttatacccaacaaaattttgcaatttatctttcaaatgcttcacttttgaagaaaaaagagaaaattgaaaaagcattttcagctgacgaaatttttgaacttgcagaagaatatcgtcctgaattagaaaaaaaatatacaaaagctttaaaccaaaattttgaagaagctaaaagagacatagttgacttttttgaaaaagagcttcaaaaagcttcagttaggtgaaaaaaatatattagaaaagccaactctagaaatgcagaaactaacatctgacctgttcatattggtttttgttatttaagtgttaaaactgaagcaaaaactgtcttcgcacctttatttttcaaggaagttaacatagaacttagacaatctttacctattttaacttcaaatggggatataaaaataaatgaaaaattacaagtttttttaaaatcacaagatttaaatgactttaaattagactttgatttttcacaagcaactatcgctgaacttgaagataaagtaaaacatatttgacctgattatgatattcctgattttgttgataaaattgacaaaaatattgttaacgacattagaaatcaaaaaataattttccactcaggtgttgttcttggtttttttgagccatctggaggatatcaaagacaattattagaatacataatcagaagcgaagaaattcacgatataataaaagtagaatttgacaaaaacatatataaaaataatattcaaaacacaatttttggtggcgaaggtttagataattttttcaaaataaatcctacaaatttttctcaagataaagcacatatctctgctattttgcaagatactattatttgaggacctccaggaacaggaaaatctcaagtaattgcaaatataatttctaacattttaattttaaaattatcagcccttgttgtttccgagaaaaaagctgctctagaggttttaaaaaacagattaggtaaattgtctttattttgtttattcttattaaatgacaaaaatatggacaaaactcaattttataagccaatggaagagctaattgattacttagaaaatttccaagaagctacagaaataaagcctattaaagtagtttctgaaagtgaaaaaaactatttacaactattgaacaacatttttagttctgattttgaagcagctattgcagcttataaagagcttagaaaatcaatgcctaattttgatgttaaagcagctcaccaaatttttaatttatctaaagatataaaattaaatccaaaactttctcctactaaaaaaacaaaattagtagaaagcattgttgaatcacaaactaaaaagaaacttacatttttccaaaaactcactttatcaaaacacagaagtgcatgaagtgatgcaagtattattctaaattatttaagtaaatacgatggagaattaggaaacttattacctcatttaaacacaatcaaacctgaagatattttaaacattcacaactttttatccttcaaaaatgaagaaaaaacaagcgtaaatacagatgaagaattattccaatgacatgctaaagttctatataatagactaaatgaatacattcaagaaaattttaaaacttataaaaagtttgttaaagaaattagagttaaaacaagagatccatacaaatttttcttaaaatacagtgatgtaattaaagtaatttattctgttattattactacacctttaactgatttatcaatgtatacaaagcaagaatttgattatgcgattatagatgaagcttctcaaatgtttttagaaaatgcatttccaattttgtatcttgctcaaaaacatatttttgcaggtgataaagaacaaatgcaaccaacaaattgattttcaacttcttatggagaatttaatgaagatgaagatgagagtttaggaattaaatcaattttaaattatgtagtaagtgaaggggttcatcagattttattagataaaaattacagatctcaacacgctgctttaatgacatttaattcaaaagaattttacgaatctaagttagatattattaaccaatttaattctgattttaaagactgtatagaagtttttaatgttcaaggttcatgagttaatggtcaaaatttagttgaggctaattttgtaattcaaaaaactttagaaaacataaataaatacaataaaattattcttttaacatttaatgcacaacaacaaaaagtaattgaagatattattttcaaagattttcctgaactagatgaagctataactcaagaaaaacttttagttaaaaatctagaaaatattcaaggagatgaagctgatttattaataatttcagtagcgtatgatgcaaatacaggttgacattcaacttatgtagctaaaaaaggcggaaaaaatgctttaaatgtagcaacctcaagggctcgtgaaaaaattattgttgcaaaatcagtagttgcagaagatgttcaaagtgcaacattaagtgaagatatttcagtatttagaagatgattgaagtttttagatttaactttacaagagcaaattagctatgcttcaaaagacaaagaagaacatactctctcttcaaattctaatgataaattcgtagagtttaaaaaacaaatttctcaggtaatatcacaaaaaattcctgatgtacaagttgttgcagattactcaattggaactataaaatttgattttgctttatttaagaagcaaaaatttgtattaggtatctttgctgacactttacaatactacaaagacgcttcaaaatacttagaatttttagatgtaattaagtttgtcaaattcaaagattttccagtagatgtaattaatcttctagagtgaaaaatttcacctaaaacagtactagagagaattcaaaggttaatagatacaacaaataatttttaaaaaagctttataattaaagacaattaaatacgaaggagaaacatgaaatttattaattttgcagagacccaaactgaaaaagttatttatgaagcaggaggtgttggtttaggtggttgaataggaatagtttttgctgtaggaattatattatttattacaggaggtattattgctctaatagtatctagaaaaatgttcgaaaaacagatcaaaaacaatccgccaatcaatgaaaaaatgataaaagctatgtatatgcaaatgggtaaaaaaccatctgaatcacaaattaaagctgttatgcgttcagtaaaaaatgccaaataatttaaaaacaggaagaaaaacgaagacaaaaacagttattttaacgattattgatggtcttggactaagaaaagaaactcaaggaaatggttttgcactagccaaaactccggtttttgatgaattgtttaaaaattatccacattcaataattcaagcatcaggtgaatttgttggtttaccagataaacaaatgggaaacagtgaagttggtcatctaaatataggtgcaggctttgttgttcatacaggaatttctttgataaataaagcaattaaagaaaaaacttttgcatccaatccaaagtttataaaagcttttgataatagcattaaaacaaatacatctttacaaattataggtttactctctccaggaggtgttcactcatcagaagagcatttgtttgaacttataaaagctgcaggaaattatggagttccacaagcaacaattcatattattggagatggtagagatgttgctcctgcgtctattttaagttccattcaaaagcttgaaaatcttttaaaagattttccaaattataaaataggttcaatagcaggtagattttatacaatggacagagatcaaatgtttgacagagttgaacaaggatttgaagctattttaggaaaatctaaatctaattttactgatgtaaaaacatacataaatgaacaatataaacaaggcattaaggatgaattttttattcctgcaatcaacaaaaaccttgattcttcttcatttttaaaggataatgattcagttattttctttaatttcagacctgatcgagctagacaaattacacatttaatcttagattcaaatctttattcttatcattcagaacataaagttaaagtcaatgtatttgtttcaatgatgaaatatgaaggtttagatactgatattgcttttgaagaagttgaagttaaaaaacctttaggaagagtaatttcagaacaaggtctaaaacagttaagacttgccgaaactcaaaaatatgctcatgtaactttctttatggatggtggatttgatatacaattagcaaattcagatagaatattaatagattctttaaaggttacttcatacgcaagtgctccacaaatgtcagctaaagaaattacagatgctttattagaaaatgcttcaaaatacaatctagttattatgaatttcgcaaatcctgacatggtaggacacactggagatttacaagctacaattaaagcagtagaagttctagatcaacaaattggaagaataaaagattgagtagaagcaaataatgctactttatttataacagcagatcacggaaatgctgaacttactgaggatgaaaatcatcaaccttcaacaaaacatactacatttccagttatgttgattacaactgataaatctttaaaattaaaagacggtaaacttgctaatatagcaccaaccattttagattatttaggtatcgaaaaaccttcagaaatgaacgaagaatccttgataataaagtaaattaaaattaaatgtagaaagaggaaaaagtcatttttccatacacagcaagaacttttaataacaatttaaatattgctattttagttaatttaataatttttatattaataattttagctatacctgtaattttggtattgctagttgcacttgttaaacccaagatcaaacaaatcaccaacacttatctttattctttaagtgctggtcttttgttaatagttgctacagcaggacttttaagagaagcttatgaaaatgcagaaaactttgcttttcaacagttttgagcaacatcaaatactcagtgaataaaatacagccaactttgagtagcaattttagtaggctcaggcgctattttaggtgtgtgtacaatttttatagtacgttttttctttgttaaacattttaaaaaagacacacattcaaatcatcacgaacatgatcacgatgatcatattattaattttaaagatatagataatccaagagctgcttgattagctattattttacttctttcacatagaacaattgatggatttattttaggttcaatagtatctaaaataagccaaggacaaagattaaactatggtctgatcataacttttgtagctcatattttgatagaaattttaatcatttattacaggcaaattcagtacggacaaaaggtaagaaaagctgtaatttataatttattaactacaattatattgattccaataatcacaattggagcttttgtctacagatttttaaatcaagcaggttgaattttaccaattgtaaatgcttcaggtggagcaattttatccttcgtagtagtagttgaattagtgcctgagtttattcatctaagatcaggagcaaaaaaacaatgatatatcacactgatatgatttgtttcaggtatcattattgcttctattttgctttcatttcacgcacatgtttctaatgcaccaacaacgcaacttaaattacctagctagttattttttaagatagctaaattaaaataactactttcaatagtataaattagttcttcaggttcgatcactattctgtacttcgttttaatatcacttttatagattattttttctatatttgatttttttgaattagaaaaagcaactctttctcattcaccaataaatttttctagataaatattaaatgcttcatttcgaacaaaaatatctttaaaaatctgctcttcaatatttgttcctgaaaacaaactaactaaagcatttagttgaattttaaaaggaattgcaaggtattttcatagattaaaatatcttggatcagggtcaatataaaaatcaatttttggaaataaagcacttacttgcaattgttcatttttatctaattcaaattcataaataaaagctttttcttctttattaaaaataacttcaggattattttcatctttgcttaaaatttgtcacgctcctgaaaaattaaattttcccaaacctaactgtgtatcaaaaccactaaaagaaatgtttcgtttttcaaattgtttagcactagcataaattgcatttaaaacttttaaatttttcattatgtaattttgtttagtttctaacaacatattaagttttgaagctagagctgcgaatatggaagctgataatttagaatcataacttgattgaatttttccttcttttttgaaggatattttaggaatatagatattaggtttgattatagaattttgattttgacttaaattagttttgtataaattttgagtttgcccaggaagaaatttgttatttttaaaagaaccataagtaccaactaaaacaatattgtttgtgcttcatttttctttagaatttacatctacattaaaaatatttattaagccctttacataaaataaataatctaaaaatctattgtgaatatttccctctcaggaaacgttgtctaaaaacggcacatcattatataaatgaagtacaaattttgtaatctttgtatcaatgctgtctaaagcatcaaatcactcttgacttgttgaaaattctttaatttcaacaatagttttaggcgaaatgtgactaatcacttttacattatcagatcagtagttattagtttgtttgtcttctttatatttcagaataactaccttattttcatctagtgttttgtatttatctaatttgtctaaaaaatttacttcttcatacaaagaagcataatttatgtcatattctgcttcatttttcttcacattagtagaaagaccaaaaaatgctgggataagtattaaaaataaaattggtagaatttttagaaaaagtttttttatttgtcatgccatacctattttttcctatttttgagagtttttgttaaaaataaaaaaaattaggaaaagataaagaaaaaatcaatttttgaagtaaaataaagaacaaaaattaaggttaattatgtcaaaagaaactattttacttaagctttcaggcgaaagtcttgcaaataaagaaaaatcactagcaattgattatgaattagtaaaaaatattgcatctcaacttaaacaagttgtcaaattaggctataaaattctaatagtagtaggtggaggtaacttttggagaggtacttctgctgaaaaaaacggaataatgagaactaaagcagattatattggaatgctagcaacactgatgaacggtttagctttagaatctggctttaaaaaagaaggattaaaggttcgtgtactttcctctattgatatagattcaagagtttgcgaatactatgtagtagaaaaagcaaaaaaatatttagatcaaggaaatataattatttttgttggaggaacaggaagaccatactttaccacagatagtgcctcaacattgtttgctgcagaaatgggtgctaacaaaatactctttggtaaaaataatgttgcaggagtttatgacgcagatccaaaaacaaatccaaatgcaaaacattatgaaaatttaacttattacaatgctatcaaacaaaatttaaaagttatggactccacagcttttacaatggcacaagataatgatttagagcttttaatttttgatattaaagaagaaaattcaatagtaaaagtaattaatggaaacataaaacacacaaaagtagtaaaataataatatggaaacaaaattagaacttaaagattttattgaaatgattaacacaaaatcagatcaaatttttcaaagattagaaagaaacttatcaaaaattaatattggtagagcaaatcctcaattagtttcatacttaaaagtagattactatgaaactttaactccgattggtgaaatagcggctattagcgttccttctccacaacaattacttatcaaaccttatgatcaaaacataaccaaaaaaatagcatcaacaattgtagctcacaaattagatgttcaacttcaaaatgaaggacaccaaataagattaatacttccagaattaacaacacaaaaaagacaagaacttgttaaaagtcttaaaaaattcgatgaagaagctaaagttgaaattagacaagtaagacaagaagtaaataaacttgttaaaaaagaagaatttagcgaagacgaagaaagaagaattttaactgagcttcaaaaacagattgacaaaaaaattcaagaagtagataaagttctttctgaaaaatcagcaaatttaatgagtttttaataatatgctttcattgctaaaatcagaaaaaaataaaaacataataaaaaaatcatcaatagcaatattgatagttttttttattttaccttttatttttattacttattatgctggtttttgaggaagaattataggatttattttctatttttctgtgtttacatacggagcttatgaaatttttgtaaaactaaataagaatatgtttattaatgtcctgattttgataaacatatttcttgtttttatccttccttttgaagactttcaagcacttataaataatggcaatttaccttgaaattactatatttcagaacattataagagttgaattgtttatttagtaagttttgctttgacactagtttgtgctttatttgaaaacgtagattgaaaacaaagaactaaaaatttctttttaagacttatattttcttatttaatagcaacttttgcaaaatttatgtttttattaaatattactaatattgaagttttagttatattagctttaactgcttcattttatgacacttttggttatctttttggttcttgatttggcagaaaatgaataaaaaaaggatttagtaaaatttcacctaaaaaaagttgagaaggagtattttttggtttttccttttcttgtgtatttgtaattttaacattttactttactccatttttttacgacaactttccaaatgacaaatttatagttttaatggtgttaagtccgatattgttaccgattgcagctatactaggagatttgctgttttccttcataaaaagaagcctaaatatcaaagacttttcaacattaattaaagatcatggtggcatttttgatcgttttgattctacgtttttagtaatcattattttttcaataatttcatcaattatttcacttttctaattttagaaacttgataaaatgagtaaactatgagcgacaaccaatcttttatttctctttgcaacagcataaactatacaattcctagttatttacttgaaacgcaagctactttagaacaagtagaaataaataacaaaaaaaagtacattttaaaaatacaaagcctaaatatattcaaatttgaagacttttttgcttttcaaaagaaggttcaacaatcatttgttcaaagacttaattacaaaatagaatttgaatatgagcaacaatattgtgaaaaaaaagaatttttaaaatatataaattttatttatcaagttttatttaataaagaaaacttttttagtaaatttcctttacaaaataaagctcgtgaattttgattttattttgtagatgaagaaattatcaaggatttagaagaaaaaaaagaaaagattttatccttatttaaaagatttggtctttcttttattcagattcatttcattttagatcatgaaagtatcaaaaaacaaaatttagctattcaagaatatttaactaatcaaaaagaaaaagaaattcgtgaagctcaacaattaagtcaacaagaaaaaaaatcaactaaagtttcaagcagaaaatcttttaacaaagcaaatcagtacgttcctttaaaattaaaggaagttagaagttcaaacgaacaatttgtagaaattcaaggtcaaatttataagcttgaagacaaagtaactaaaaataaaaatgttttacgaatcataaacgtaagtgattatgaagaagctattatgattaatgctttttataatcaagatagtgttttccctttaaataaaggcgattttgttaaggtttatggtgaattagtcaaagatatttattctagagattttgtaattaaatctcacaaaatagaaaaaattaataatattttccctgttagaattgatgaagcaaccactaaaagagtggaattatttgcaagaacaaaaatgtcaactatggacggagtcacagatgctcaagactatgtgaaaatcgcgaaagcactaggtcattcagctataggaatttctgatttagagtcagtacaagctttcccagatttttattttgcttgcaaaaaagagaatattaaagctatttatggaacaacattttcttctactcattcaaagatctttaaggttttaaatcttagatataaccgagatttagaaaacgccagatacgttgtttttgacttagaaactacaggattgtctccaaaatttaatgaattaattgagtttggtgctgttgtttgacaaaatggacaaatattagaaaagcacgagtttctaattaaaccaaaagaaaaaattccttcttacataacagacttaactggaattaccaataaaatgatagaaaaagaagcaatttcagtagaagaagctgctgtgaaaattaagcaaatttttgaaaatagtattttggtagcgcataatgcaaaattcgattatggttgtttagttgagttttataaaaaattagaattatatgaaattcaacaaccagttattgatactttggaagtaagtagatttttatttccaacacaaaaaagacacaatcttaaagaattagcaaaaaactcttcaattaactatgacgaaaccgaatcacatagaggaggttatgacgctgaagttttagcaaaagtttgagaccaatttttattaaaattaattgaacaaaatattaaggatttatacactttagattcagttggttcaaatgttttagactttaaaaggcgaggatttttctcaaaagaaataagagcaattgttaaaaatcaagaaggattaaaagaactttttaaacttattagcctttcaaatacagaatattttttatcaaaaccaattcttttttatgaccaaattaaatcttcaaaaaatattttatgaggaacaagtggttttgattctcaactaatggaaattgtgttttacaatcaccacaatgacttagaaaattttattcaaaaattagattttattgaaattccaaccccttcttcgtttattcatttaataaaaagaaataaattaaaaaaagaagatgtacttaatggattgaagttagttatagatttagcaaaaaaacacaaaaaaattgttgtagcttcttcagaaccaagatatataaatcaagaagacaaaatttttcatcaagtttatatttatgcaaaaggtgttggtggtaaacctcataatttttttggtggagatacaaatcaaaaaaatgatcacatttttcctacaaaatacttcatgaccactcaggagttaaaagcagaatttgcatttttagaagatcaagatttaattgatgaaattgttgttagaaattccaataaaattgcaagtttagtagaagatgtaaaaataatcaaagacaaactttatccacctaaatttgatgattctgcttcaaaaataaaggatttagtatataaaagagctcatgaaaaatatggtaacaatcttcctgataaaattgctgtaagaattgaaaaagaactcaatcctattattgaaaatggttatgatgtagtttactgaatttctaaagaattagtagataaagcaaaatcagaggggcaaaaagtaggttctagaggttctgtaggttcttcagttgttgcttatttaataggcattacagaagtaaatcctttagaaccacattatgtttgtaaacaatgtaaaagtgttgaattttctacagatgaaaacattttatctggttttgatttaaaagataaaatgtgtaaaacttgcaaaatcacttatgacaaagatggacaaaatatcccatttgaaacttttttaggatttaatgcaaataaagttcctgatattgatctaaattttgcaggtgattttcaagtgcaaacacacaattatattcgagaactttttggtgaaaaatttacttttagagcaggaaccattttaggttatgctgaaaaatcggctttttcattagcaaaaaaacttaatgaaatccatacaagattgtacttaaatgatcacccaaatgaatacgaattttctatgtattcaaacacttttttagactttttagcttcaaaatcaagcggagttaaaaaaacaactggacaacatcctggaggaattatagtaattccaaatgatttagaagtagaagaatttacacctatcaatttccctgctaacgatgaaaattctgattgaaaaacaacacactttgactttgaaaatattcatgacaatgttttaaaattcgatcttcttggtcacgatgatcctattatggttcgtgaactagaaaaattaacaagcacaaaagttgaagatattcctaaaagtgatcctaatattattaaattattttcttcattagagcctttaaatattgatccaaaagatatgccaggagaaaaaaatggcgcaagaggattacccgaatttggaacatcttttgttagaagaatgctaaatacagcaaaagtaaaatctttttcagatttaataaaagtatcaggtttatctcacggaacaaatgtttgacaagataatgcagaagagttgatttctaaacaaaatttaagtcttcaagatgttatttcttgtagagatgacattatgctttacttgattaacaaaggtgtaaatcctttaatttccttcaatattatggaatctgttagaaaaggaaaatctataacagaagagcaacaaacaattcttgaaaatcacaatgttccttcttgatatattgaatcattaaagaaaattaagtatatgtttccaaaagctcatgcagccgcttatgtgttaatggcttgaagaattacatattataagctttattttcctttagctttttatgcagtttacttttcaattagaattgactttaaaaatatagatgctttgattttacctaaacagcaattatctaatcaaatattggctttaaaatcaagagaaaatagtaaaaaagaagacaaattgtcagaaaaagaaaaaaaattaattcctattttagaagttgctgaggaactaaaagctcgaggatttgaaatagaaaaaattaatctaaatttatcagaagcaactcaatgagttataaatcaagaaaacaattcattaattcctccattttcgtctttagatggaataggagaagcaaacgctactaaaatcatactagcaagaaaagaaaaagagttttcttcaatcgaagatttcgaaaaacgtgcaggtgttaattcaactgtaattcaaaaattaaaagatatgggtgtttttaaagatttaaatgaaacccatcaaataactttgtttgattaataacaaattaataattctaagttgtataatttagctatggaaataggacaagtagttgtgtgtgccattaaagaaataaaagaaaaatatttctgaactgatatgcccgaagaatatcaaggtgttgtatttataaatgaaattagtaataagtttattaaggatttaacaacactaaactttaaagttggacaaaaagtcaaattagaaattttaactatccatcatgcaaacaaaaaagcttctttatcattcaaaaatgtaaatcaagattttgaagtaaaaacaacaattaaaaaaccaaaaaaaacaaaaacagataaacacacaagcacaagtaagaaaaaacgtaattacgaacttaaaaccacacctagtggctttgagaatttaaagaaaaaagcagatagggaaattgaagaaaaatgaagattaatttcattctcgaaaaacaattagacgaagaaattaggagaattaaaaatccaaaaaaaattagaaatttaacatcactacaacacaaaattgaccgcttgcacaaacagatattaaatgatgctaataaagttgatgacagactaaagtgaatattctttcccaacaatctagatttaaatcaaattaaagatatgaaacggattgttaagaaattattagcaaaaaagattactactttagttgtaattgcttctccaaaaatttatttaggaatcaaggcagctgttgattttatcaacacaaatgagcttacaagcaataaaaaatttatggaagtaatttttattgaaaattctttatcttctgtagagttaacacaaaaattaaattatgttagaagcaaaaattttgcaattaatataatttcaacatctgatgtagactttgaagcacaattagtttttagattttttaaagatctattgtatagacaatttggtgatgatatatcagaaagagtttttattacagctcctataactcaacaaggaatttgaacacaaattgcaaattttaataacttcaaaatttttgttgctccagcaaacgtaggagaaaaatttgctattttttctttattaagtttcttccctatgctatgcgcaggtattgatttaaaaaaattaatttatggtgcaacacaagcaaatagaacattttctcaaccagatgtaaggataaatcaagcatatcaatatgctgcagcaagatatgtactttttaaaaaaagaaatattccaatggagtttctaatatcatttgatcattcttttgcttcatttaacagttgatgaaaatttttattttcaacatcagagttagtattagaaaatttagatgatacaaaccaaaactatatagaagtaattgatgaagtagaagaaattcaaaaattagaagagccacctcaagatgatgatcaagaaacagaagacaatgaagaagaaaataacattgattttgatgaaatgaacttcgaaagaaaagaactaaaaaccacaggaatttttccaaattctgcagtatttagtactgacattcacactttaggtcaattcatacaaagtggttcaaaaatattttttgaaacacttgtttttgtaaaagaacctgcttatgatattttaattgcagaagaaaataaaagtcttttcagaaaagatttacttgataaatatgcgcaaaaaacagtgcatgaaattaataaagcatcattttttgccacaatcgattcacattcaatctctggtaatattgcacagttagttatgaaattagaagatcatagtgcagagacgtttgggtggttagttatgtttttccaaagagcttacattatgtatgcatatcttttaggagtcgatgtttttgatgaaacaggaatagaaataataaattcaaatttctgaaatatattgaacaaaaaattaagcaatgattcaacagctaaaaattaacatcctatgtttttataggatttagcaaaaaaatttattaaaattagaacaaaaaatacactaaaaggaattactatgtcagttaataatacagatacaaaagaaaatattttattagaaattcaagatgttaattttgattgaaaaagtgaagttaaaaaactagaatatcaaagattaataagacaaaataataataaaattaattcaacctcaaaaggaattccagaaaaactagactttgatgggcaaaattttttaggttgagctaatttttcagaatatgattgattagtaaatggttcatcttatagctaccaagaactaataagaatgcaaaaaattaaaaaaagacttttagataaaaaagtcgaattattagtagttattggaattggtggttcatatttaggagcaaaagctgctattgactttataaatggtagtttacctaatattgatcgaagtaatgcaatggaagtaatgtttgttggaacttcattgtcttctgctgacttgtatcaaaaattaagttatgcaagtactaaaagatttgctattaacgtaatttccaaatcaggaaccacaattgaacctgcaatagcctttagagagtttagaaaacttttagaaaatcaagaaaatggttatataagagacttgatttttgtaacaactgatagaaaaaaaggtgcattactagaaatagctaaagcaactgtagatccagaaagcatttttagaattccagatgatatgggaggaagatttagtgttttatcagctgttggattttttcctatgttatgtgcaggaattgatgtcaaaagagtgattaaaggagcttcattagctgctcaaaaatattctcaagatttagatatttgacattctaatccggcttatgtttatgctttaataagatttttaatgtataaaaaatttagcaaaaaagttgaaattttaataggttatgaaccatatttagcattttttaatgagtggtggaaacaactttttggtgaatcagaaggtaaagatgaaaaaggactattacctgcttcagtaatttttagtacagatttacattcattaggtcaatttattcaacaaggttcacaaattttctttgaaactacaatttttattgaaaaaccaatgtatgacttagtggtaagtagacacagacaaaatcaagataatttaaacacacttgctgacaattcagtttctattcatactttgaatcaaatggtatttcaagcaaccttagaagcgcactctaaaactgctaaaattcctaatatagtcttgaaattgaaggataatagcccagaaacatttggatgattagtaatgttttttgaaagagcttgtgctatgtctgcctttttattagaagtaaatccatttaatcaaccaggggttgaagtttataaacataatcttaaaaaaatactatcagagtaaatttagcttcaaaaaaccagcaaattgctggtttttttaataattcgattttattctctcaatattaattcttgctttgttcaaataggcagtttttatttcatcaaaagtaaattcaagaagagaaataaagcctaaaaagtattcaaacagttctttcaagtcttcggtttttgttgaataaccaaattttgtagctaaataaaaagtttttaaaaactgactatctaaatctttgttttctacaattttagcttctaaaatgaagctcaagttatgttcaatagctaaagaagaaagaaaatgtattgcatcaacatattcttcttttactttttcaacattattttttttgtttacttttcaatatttaaaagattctatttcattagcaaattcagcaatttcaactatcaatgccataactttttgctcagaaattttcttaggatttacttcttgttttctttctttcattgattcaataaataaaagatctagttttttttgttgctcaaaaatatctctaaaattcataaaaaaattatattaatttacttaaaaaggcaaaataaaaaaacaaactatttgtttgttttttgtatttataactatttttatattatttattaaaatcacttaaacctgacatatcaacatcttttttctgttcttcagaagcgataaataaaggtagtgtatataatttcattttttctgctttaataactgcaggataaagcataatactttgattaaattgagtaacatctatattataaagtcttctagctgctgcaatttcgttttcaatgtattgactagtactcattaaatcaactatgattgaatcagcttttaagtttggatattgttcataagcgatgttaatgtctcttgcaattgaattcattaaaatttgttctttgttagactcgttaatattgtttcttgcagtttttcctgatcttagttctgcaacttttgtgtaagtatcattttcaaattttaaatatgcttttgtttgttcaaataatttaatcaaagtgtctcttctttttgctaaattaacttcaattgaactagcagagttattgatttttaattgttgtgaattaaatttatttggtcaactaacaaatcaaagatataaaaatataaaaaatcctataactgttagagaagttaaaacaacaaaaattcaaaatgaagttttttgtgattgtgatgcgacagcatttattgcttcattttgaacgtttggattaaatccttctttattttctggtctttcttgtcttgtatctaataacataattttcctttttgaattaatcgttcattatttcgtctattaattttactacttttttcatttttgttatatctgtatcaccattatttactaaaacaataactcttgattcttctgtaatagttttaatttgttcttcttccaaaatagatgttagctcttgtatttgttgcgttttatcttgtattggaaacatttgtaggtattttaaaaaagttctaagttggaaaggaataaaagaaaaatgtcttcagttttgttgtcaaatattattattttcttcagttttttcttcatttatgaaggattttgctttagtcttgttaactataaaaatacctttttcttctgtcattttataaaatctttcgtaaggaacatcaataatatgacaacctgtatgtttaccacaaactctaatactatcaattaattttttggaataataagaatttaaatttacatcaattgctaatattgtttcttcttcatttcagtattctcagttttccagagttaatcaagatctagttgtattttcgccttttataaaactaaagtggcgtcaataagttcaaattaaagtttttcaatcatctcttattatttcatctatttcttgtttttgttgactaattctgtaattatgatttgttaaataactttctctattaaatacaggaaaaacaaaaataagtgaaagagcttgaattaaactataaagatatggagaacaagattcttttattttgtcaaaattttcttgaggtgttttatataaatataatagttgattaaaagaagaagtgttaaactttttaaaaaaatttacacgagaaagagcttctctatttatgaaaaagttagaatctattttatataattcatgttcaattcctagattttttaacgatacaatatcttcttgagttttgatagttaaaaattctaatatgggagcagacatttggtcttcgtaataatcatagtctaaacaaacatcagaattaatacatcttattggacgaagttcttcattatgaaatctaatatcaatttttttctgaaattctgaattttcaaaaactagtttttttctttttttaggaaattctgccatatttaaatcaaaactaatttctggatgaaagttagttttagacattaataaatatctaggagttaaaaatggtgtttcttcataatgagtcgctgttaaagtctcatacctagtttctgtataagtttctcaagtcccattaacttttcttcttctaacaacagtatatggataactttctgatcggctagtttgaacagttctaaaataatgcctaattatttctgcatccacaaaaggagtggatttgtaataaaaagaaatatagttatctatgctaacaagagtaggttttaaaagagatttttcatttaacaaaagactatagcgttcaggttgaaaatcataaaatatagatttataagcatcttcagagtaggtaaaacctcactttttaaatacatataaagctatagttttgtaattaatttttccaaataatattgaattataatcttcaatattttttattaatttattaattgcgtcttttttttcttgacgaaattgaacaaaattatttatatcttttcttaattctttaaattttgggattaagaaaaatcctacaattaaaaggcaaagtaagataattccaatagattttattttttttaaagtaattttatttgattttttatagtcgtcaattgctttatttaactcttcaatttgtgaaaaatcatcttcgattttattaactaattcttcattttcttttgcaaactcttcaaaaaatagatccaagaccagaggaacagaatcgtatccatttctaaaaaagttttgtacaggatcattagttactttagaataattaaacaaaggattattgctttttaatatttgtttaagttcttcttctttttgtgatttattttctgataaatagtccatatattcgtctaaatatttttacactttcaatattaaattgtttatctaaataattgttatataaaattacaggtagtttaaaattgtaaatttataacctttaaaatcattgataatgtaaacattatttttatctaaataagtataaatacattttagatttgattttttaagttttgttttaattagtataataagttatctttctttctgtttatgtgttatatttagtgagtaaaattgttttactaactaaatataacacaaattttaacgatttatttcttattacttattttgttttaatttatcatattctttagttaaatcagttattgttttatatttatctaattgttggtttgtcgaaccatcttttgtgattattttaacataaaaagtagaaggttcatcattattttttcacatatggctactaaagaaagtttttcagttatcaacatttacattttcatctaacataaacgaatcttctgattggttagagttgtttgctattatttgaattgatttaatattgttggaaatatgttttaacacaaaatctgtaaaaaagtttttagggttgttgtttaaaacagaatttccattagtagttgttttttcattttctggagaatatgatgaagttgaagtacgagtaaatacttcctgttttggagtattagtttcttgtgtttgagtttcttgttttgtagtagtttgtgtttcagattttggagtttcggttttttgtgttggactttgttgttctgtagtagtttgtgtttcagattttggagtttcggtttcttgtgttggggtttcttgtgttggggtttcttgtgttggggtttcttgtgttggggtttcttgttttgtagtttcagtttttggagtattagtttcttgtgttggtgtagtttcggtttcttgtgttggactttgttgttctggagtagtttgtgtttttggagtttcttttgttggagtttcttttgttggagtttcttttgttggagtttcagtttttggagtattagtttcttgtgttggtgtagtttcggtttcttgtgttggactttgttgttctggagtagtttgtgtttttggagtttcttttgttggagtttcttttgttggagtttcggtttttggagttttagtttcttcttgtgttttttgacaagaaacaaatccaataaacgatactacaggtaataatgtaaaagttgataacaataatgaattttttaattttttattcattttaattttccttctatttaaaaatataatgtttatttaattgtttttgttttgtttttattatttttatttaatttttctttgaatatattaagtttgggtttaaccacattttcataatgagttagtaaaaaatcttctactttttgaggattatattctttcataaaatgttctaagttttcattttgagtaaataaatattcaacagtagattcagcactcatttaacattagaataacctctaatatgtcatatttaatagcatcaggttctaaaatacttgaaatagtacttgttttaaattttacaattttttgattttctttttacataattttctaattatttaacaaattttttcaggatcatcatagtcaattaaatcattagtttcaataaaatctaatgataaaaatttattaaatttatttcaatagtagttatatgctaatttgttttccagctcaatgttttctatatgactattttgcatggtaataaaatataataaatttttttccttatcaggtctatataatacctttttaacttgaaaaaatctaccatttgctaaaaaatttatattgtcagctttttcttttttagtctttatgtgtacaggaataatgttcagttcattttctggtccatttagtttttgagctctcataaaatcaagggttcaagaaaaatcactgtcttcattttcgaagtcagagaacttcatttttcttcctgaaaaatcaaatgctagttcacaattgtcaaaatactttcttcaaattaatgtttttaaatccattttagtttcctttcatttccaaaaaattatattaatttaacaagatttgtagttttgtaaaaatcagtttttcttatataattttacacatgaaaaaattattagaaagattaaatacattattatctactttaatagtgtttcaatcaaatgtaaaaaattttcactgacatattaaaggaaatgacttttttattttccataaatatacagacaaactttcagcgcaaacacttggttttgtagatgaagtagcagaaaaattaataatgcttgatcaagttgtagaaactaaatttgaaaaaattttaaaatcaagtttagtacaacaatttgaaggagaaattatttcatccaaaccagctacagaaagaattattaatcaaattgaagtaattttagcaagttgcaaagctattcaatcaacagaagatgaatctatgtttttagttgcaccattaatagatgaaatagttttatttttccataaatttttatgacaatttaaatcttctatacagtaattttttatcttttaaataatctagcaataaatttgaatttattgctattttttgcttttctgttataataagttgaaaaaaatttgcaaaggacaaaatgacagtaaaaaacgctagaaaattaggtttttttgcagcattagcgatgctggttggttcagttgttggagtaggaattttctttaaaaatggttccatccaaagagtaactgaatcacaaggtatcacttgattactatcttgagttattggtggtattatttcgcttattgtagcaataaacttttcagaaattagttttctgaaaccttcaaaattaaatggtttatccaattgactatatagatctggaggcaagaagataggatactttacaagtttttcctatgcatttttctattatccaatcttagcaatgacattaggtgtcatattatcagaagttttagtatttttcatcggagtagctgctggaaaagacatttctttaccatattatgcacactttttaattggatcttcatttattttatgttatttaatattaaatcatttttcaataaaaatatcagggtgactagcattagttacaacagtattaaaatttgtaccgttaatatttgcattaatccttggtttagcattggcaaacactcatatagtagaaccaaattctaataaactaacaaatgcttttaataacacaacttttgatataagtaaattaattttagctcttcctgctgtattatttgcttatgattcatttttatctataggtttattccagaaaaaagtagtaaatcctagaaaaacagtaccaagaacacttgttatttctatgattattattgttactgtatattcacttatagctctttcttcagtatttcataactcaggaagtatttcaggaattatttctgatgtatttgaaaaagaagtagcggatccagtaaatattgtggttactttcttcttgcttatttctgtagttggagttacaaatgcagtttcatctgctactttaatacaaatgcaagatcaaaccagaattaaaacagtatttggtgttagatttttagcaaaaaaacttggagaaacaaaagcatcttgaattttattagctttaaactttttattttgaattttagtaattcaagtaccaagtttagcggctccatttctaactactgctagaactgaaacaggtgtgcctattccaggtaagtttactactggaacagggacagatgtattattagattatatgtctaatgctccaacagttttcttctttgttttatatggtttatcattagcaacatactctttaagaagaaacaaaatagctaatcctaagaatagacataacacaataattttccatacaattactattattggtatttcagtaatagctattatggaaattgcatatatctattctttaattgcagcttttgtaaataaaccatgagcaagttcaggtgcaggtatatttgcggataatggattaatacttccttgaacctatgcttttgtagtatttattgttcaattctttatgtttgttggtttaccagtagttaattacttattgataaaaggtattgaaaaaagagatattattaaacaattttctcatttagtagaattaactccagaagaacttgaacaagaaggatttgaattttaaatcttaggtaatactaagtaaatgaataaaaatcaaactaaaaatcagtttgatttttatttttcaaactcattaaaatatattaaaataataaaactaaatttttaaagaaggagacaaaatgttagagattatagaattatcaaaaatattttcagataaaaaattatttgaaaatgcgaatttaaaatttgtagaaggaaatacttatggaatcattggagcaaatggtgcaggaaagtctacttttttaaaaatattgtctggtgctgttgaaccgagttcagggcaaataattaaaactcctgggcaaagaatttctgttctttctcaagatcataatcaatatgatgaatacaatgttactgatgtagttataatgggaaatgaagaactttataagattcaagaagaaaaaaatagaatttatgctgatgaaaatgctactgaagacgattatacaagagcaagcgaattagaagaaaaattcggaatgctaggtggttgaaatgcagaaaacgatgcgcaaacactgttgtctgaactaaatattccaaaagaagcttgaaatttgaagctaaaagatttaaaagcttcacaaaaagttaaagtattattagcgaaagctctttttggtgaacctgatattttaataatggatgaaccaaccaaccatcttgatattaaatcaattaaatgattagaagaatttttagttaattacaaaaatatagttattgttgtttctcacgatagcgattttttagatcaagtttgtacacatacagttgacattgattttggagaagttaaattatttactggaaactatacattttgaaaagaatcttctgctttaattaaagaaatgcaaaagaatgcaaatgctaaaaaagaagaacaaatagcaaaattacaagcatttatagcaaaattttccgccaatgcttctaaatcatcacaagctacttctagaaagaaatccttagaaaaaattacattagatgaaataaaaccatcttcaagaaaatatccatttattcgttttaacgtttatccaaaaccaggaaaacaaattctaacagtagaaaatctttcctataaaaatccagaaacaaatgaagttttatttgataatatttcttttacattaacaccaaatgaaaaaatggtaatttttggtgaagatgatttagtcaaaacaaaattattagatattttagctctaaaagaaaaaccaacaacaggaacagttacttgaggaaatactatagtttcagattattttccaagtaataatgcttcatttttcaataaagatttaaacttattagagtgattgagccaatgacctttaaacaacacactagaagaaaacaaagacaattcagatcacagaatgagaagttttttaggaagaatgttattcaacggtgatcaagtatttaaaaatgtaaaagttacctcaggtggtgaaaaagtaagattaatgttttctaaaatgatgctaacagaatctaactttttaatttttgaccaacctttagatcatttagattcagaatccatcgactcagttattgaaggattacaagcttataactctggaattatttttacaacctacaacagagcaatgattaaaaaagtagcaaatgttattttagatattcgttcagatgcaagctacatttttaaaggaactttagaagaatacgaagaaaaaatggggtactaatgctaaatgatacaatagttgctattgcatcaggattagtcaatcaagctatttccatcatcagaatttcaggaccagaagctttttctacagttgcaaagatctttaaaggaaaagtcggaagtacagctaaagaaattacttatggttgaattcataacaacgaagaactcattgacgaggttttagttttatgatttaaaggttctaacaattttgtaggtgaagacacagttgaaataaatgctcatggaggagtattaaatacaaatttaatactcgaacttcttttatctcaaccaaacgttcgcttagcagaaaaaggggagttttctagacgttcttttttaaatggaaaaatggatttaattaaagcacaagctattaatgatttaataatggctcgtacaaaaaagcaagcacaattttcgattcaacaattttcaggaaaaacaagtgcttttataaacgaacttatcaacgatttgttgcatataatagcaacaattgaagtaaatatagactatccagaatacgatgatgtagaaatactcacaaacgaagttttattacccaaacttgaattattagtttctaaatttgaaaaaactattgagcaatcacaaagagcaagagttatttttgatggtatcaacgtagcactagtaggaactcccaacgttggaaaatcttctctattaaatgctctaattgaacaagataaatctattgtaagtgatattgcaggaactacaagagatgttgttgaagcttcatttgtattatcagatattatttttaagttagtagatactgcaggtatcagggaagcaaaaaacaaaattgaacaaataggaataaaaaagtctttggaacaaatcaaactagcttcaatagttttacatgttttagatgcaactaaagacgaaaatgaatttgacaaactcattgaagaacatagcaaagataaagattatataaaggtttataacaaaaaagacttactatcatctgtcaaaacaaacactaataaaatatttgtttcagctaaaaacaatgatgttagtcaactagaagactatattaaaaaacactatgttgataatatacaagaaaatgaagatattattacaaacactagatcattatcattgataaatttagcttataataacttaaaagaagcaataaactcacttagaaacggatttagtccagacatagtaattgttgatttaactcaatcttgaaaggacttaaaatctatactaggtgattcagacaatgaatcattattagattcaatattttcaaatttttgtttaggaaaatagctttattatttaaaaaaattcaattcttatactttgtttgagcgtaaataagcaaaaaatattaaacaaaaaagaacaatatttgctcttttgtttatctaataactctaacttaacttattattaaagaaactaactctttagctgtgaattttttataagcgcaagcaagcgttcagaattggcatttaaaataattttttgcaagattcttgtctgtatacactaaagcatttttaggtcaataagtaagtaaataggttcagagaaaataaattaatatatatttgtatataaaaaataccttcaaaaaagaaggtattttttattaaagttgttttattttgattgtcctgaacttgttaatccagtagaaccggttgaacctgttgaaccagtagaccctgttgatcctgttgatccagtagaaccggttgaactagttgaacctgtagaacctgttgaactagttgatccagtagaacctgttgaactagttgatccagtagaacctgttgaactagttgaacctgtagaacctgtagaacctgttgatccagtagaacctgttgaactagttgatccagtagaaccggttgaactagttgaacctgtagaacctgttgaaccagtagaccctgtagaacctgttgaactagttgatcctgtagaacctgttgaacctgttgaactagttgatcctgtagaacctgttgaactagttgaccctgtagaacctgttgaaccggttgaaccggttgaacctgttgaaccagtagaccctgttgatcctgttgatccagtagaaccggttgaactagttgaacctgtagaacctgttgaactagttgatccagtagaacctgttgaactagttgaacctgtagaacctgtagaaccggttgaactagttgaacctgtagaacctgttgatccagtagaaccggttgaactagttgaacctgtagaacctgttgaaccagtagatcctgtttgaccatttgttgttcttcctggcattgtcatttttagaactggagcgtcaactttagattttttttgttcttgtttaactttttctaactctgtttttaactctgtatttttagtttcgagctctgtcactttggtttgtaaagtttctgccgttgtttttagagaattaatttcagtagttaattcattttttactgtattagttttagttgtaatctcagtttgtaaagctgtaattttagtagttaaatcagtaatttggtcagctactgatttacctggttgttctttagtttccgcttgtgtaccgcatgaaatcaatgctacaactggtaatgataaaccagctaatggcaataagaatttagaaattttttttgttttaaatttcatcttgttaatttatacctcttttattttttgatttagattttttaggattttatatatataaatatatataaactttcgttttttacacaacacaacataaaatttaaatatgaaagtttattaataaaatattaaaatctaaaatccataattaaattataaagaaaattattaaataatattaaaattttattcaaatactctttgctacagtgtaatttttcaaaataatgaaatatcatttttattaaaggttaatagcttttaaaaaagaagaaaatcattatacactgtacacaagcggaaactagcgctccagctcctactgctaatgctgtaacaactgagcaattaactactgcaaaaacagaaattatcaacaaacttgaagaacaaaaaacttcaactactactgatatcaattcaacaaaagaatctttaactaaatttcaaaaaaatgttgaaaatcacttaacagattctttaaaaataacattagtaaaacaacttactacagtaaatttcttgttagaaaaagtaaaagaattatctgaccaaatacacatagtttctaaagaactattaagtaaagatttcgaagatcaaagtaattcccaagaccaaatgaaaaaacaagagttagacaaatctgaacaagaagtagttaaggctctaacagaacaaaaaactgaaattgaaagccaaataaaagaaaataaagaattgattcaaaaattatcagaaataaaagacgactcttttttaaataccacaacaggtttaacttttgtatctagtttagaaaataaaattttagaattacaagatttaaaaagagatttagaaaacacatttaaaaaatctgtagcattccataattcagttgaacaagcaaaattcataaaagaaaaacaagcagacaagaaaaaaattaattttataataagagatttatttatttaagaaaataaatatacaaaaaaactgtgaatactcacagtttttttgtatctgttaataattttatattataaagagaacgttaggttttcctaagtattgtttttgaacttccagttgttgtagtttagcatacaagttggtaagcatcgtctttattgctaattgttcattgaacacattttgaagtgataatatttcttcttttagttcttcaagttttttaccttttactgtgcttgttaagttttctaatgactcttttactgtgttaaatgcagcagtagttgaagtattttgtgcttcaattttttgataatttttgtttttgcactagttaattgctcagttgttacagcgttaacagtaggtgttggattacctgtgcctgttcttgcactttgtaagtgtaaaaacaaatttatatagaaaaatgaaggaaatttttatcatttttcactgttttttagtgtaagaaaataaaaaacttttgaataattagttttaatagtgagttatattttttatcttcttaatttgattttgtggaacaaaaattaagttatatgtttgattcaaaatattattaattttagttttttgtaaataatttaaataattataagaaagatttgcaattaaatcagaggctctaattataggcttaaaagccgaatttcaatatttaagattaatgtcaacatcaaaaaataaagtgtcattatattctggatttgatgttccttttaaatcttcagcaatcaatttttctaaagaataataaccattagatttggtagtttgttgatctaaattaagtcttatatttaattttttgttaatatctagtttattttctattactagtttttccaaagtagttctaattaatctttttatcataaagtctttaaatctaccaatgcttgatttttcttcaagaatttgagtattaatgtctttaataaatgtagcaactaatataacagaagaagaatcaacaatattaaatattttttctttgtgttcaaactttattttagaagcttttaattcctttaaatttttgtatatataaaaagactttcttaatttattttccatatacaagaatttattatgggtttttagtaaatcagaatcatctaaaaaataaaaaccagcataaacaaaaacattatcattactgtttttgttaaaaacacctgcatcatcaaaataaaatcttataacttgctctttatctttcttatctatatttttcataaatattagtataaattcaattaagaatcaatttattaaaagttgttgaatcaatttttttatttttatagtagtaaattaaattatctttaaagtttttatcaacaaaagtaaaaaaatattgactaaaaataaaacaagatttaaaaaaaatagattcgtgagtttgctgtttattgtttaataattttaaagactttattttagatttttctagtatagtttttaattttgaaaataactgattatctatttcaaaatcaaaattttgtaattcaacaatgttattttcatctttaaacaatttatctattatttgactaatattatgttttttcttcatttctaaagctatttgcctattttttataaacattttactggataaaaaaagatgaatagacattaaaattactaaaataattgcacttattgaagttacgacaattgagcttgtatcctcttggaattcttgaaatcttgttagatttttgttaaatatcaaaatcataaaaatgctaataacaatataaaaagatattactgttatataagaaattattctaagtaaaaaaaactttttaaaatcaatttgattttcatattttaagtacaaataatcttctaaagaaaaaggttttaatattttggctgttaatttagaataatgtttttcaaaagaaaaaacaaatataatcattaaaaataaaataaaaggcaaaatcattataattattaagtgagctgttgacattaaacctccaaaattaataatttaattttactataataatttttataaaaataaagaaaaaagaagaaagtaaaaaaagagaactttttgctctctttttttactttctatagttttattttgtcataaaactgttttgtaatatattgaggtcttgtaattgctgaacctacaacaacagcgtcagcattacctttaattaaagcatctcttgctttttttggagtatcaaatccaccttcggctattaattttaaattatttgctttacaaagagctgaagctcattttaaaaaatgataatcattttctgttgaagaattttttttggttgtttctgtataaccacgtaaagttgttccgatgtaatcaaaacctaatttaattgatatttcaacatcgtcataatcagaacaatcagccatcagtttttgatgaggaaatttatgttttttaaaatactctaccatttgttctaatgtagtatttttaggtctttttcttaaagtagcatctatggctattatatcaactttggtatcaattagttgcttaagttcctttatggtaggagttataactacatcaaatcttttatatttcttcttaattattccaataattggaactttaaagtcagcgtttattatatctttaatattatttatttgactagttctaattccttcagctcccgaacttattgcagcttttgccatttttaatacagtttttccaccatacataggctcaccttttaaaacttgacaagaaacaataaatgctttatttttcaataatgtatccataatttagtattaatttaattttgttgaatttgttcatgaactatttgtgttaaggaatcaaattgttgaactaaattcgaaagttgttcttttcctttagttgtttttttgtaaagtttttcttgtttataaattaatttctctaattttaataagttatcaaattcttttgttttggttcatacacttagattaataatagatttttgctttaaaaatgaagcaaaaataaaagaagtaaaataacctatacttaaagaactcaagaatgaaataatagtaattcaagcaggtccaaacactattctagatgattcaggaataaatttttgtgtcatcagtcataaaggaaatgagacaagaaacccacaaattaaacctactagagctccttgtgaattagttcttttagtaaatattcccaaaataaatgttcctgccacaggagctgcaaacaatcctataattgataagaaataattaatgatgttttcttcttttgtataaattagtaaagctgaaaccataaagccaaaaattccaaaaacaattataagaatttttgatcaaatattaagcgttttatcacttgtttgaggataaaaatatcttcaaaaatcaaccacaattgttgtaactaatgaatttaaagaagaagaaattgtagactgactagctgcaaaaacagcagaaagaatcaagccactaattcccattggaagtacagaaataataaaataagataaaagttgattgtttgctgcattttctacacctactatttgtgaaattgcatttgaatcatcaacattgattccacgtgaagaatagtaagtgtataacatagaacctacaccataaaatactaataaagtaataattactaaaataatatttatatgaatagattttattactgcatttatattttgtcctgttttgtatctttgaacaatgtcttgactagctgtgtatgtaaaggtattttcaataattttagaaagaaaaatgaagaaaattcctccagaagctaggtctatttttcattgattttctttggtaaaaaatgagtattttatagtatcagaatttcaatttgtatatgctaaaccaaaaattaaaataagtaaaatacctataaaaagaacaaatccttgaactgcatcagttcaaagcactcctttaaatccacccaaaaaagtggaaataactacaacaacaattactataaataacaacaagtaactattgatgtttacaaataaagaaagtgctaaagttggtatatataaaacaattgcaatcctaaaaatgtgaaacaaaatgaaggaaattgaagcaattgcccttaaagaataactaaatcttttttgtaaataagcatatgctgtagattctgtcattcttctataaaatggaattacaaacttaattaaaataggaactactaagaaaaaagaaagttgtgtgattgctcacattcaacccgttttaaaagcaatccctggagttgataaaaaagtaatggaactaagtcctgtagctcaaatagataatccaattactatagcaggaatcttcattccttttgcagttaagtacttggaattatcaaattgaccttttgctttttggtgttttgcttgtaaaaagaagtaagctgacattgctaacattgcaataagataaaacaccattagcactcagtctagccaactaaagtccatttattattttttaataattttttgtatttctttagctttttctaataatgtgctacggtcatattggtagaaaggttttcttgttgttccatgaataacaccttctacttcaaatacagctttaattcctgccattactcccatgtcaactaattttgcaacaaaatcgttgtattcatgtacagattttttaactaattctttatctcctttttcaaaagcttcgattattgctctagctccttttgcattaatgttataagtagaaccaataaatcctttagctcctaaagttaaagctggtgcaagtgcttcgtcgaaagcaaataagaataatttttctggataagttcttaataatctttcaaataagaaaatatctgtagcaccatattttgcaccaattacatttttgatgcttaataattcaccaaactctttaattccgatttttttacctgctaattgaggtaagtagtagataaataaaggtaaatcaacatttgctgtaatttcttcatagtatgatttaacttcttgaaatgagaaattgtaataataaggagtaattgcactcacagcatcgaaaccaaattcttttgcttttttacctaagtaaattacttcatgaacgtttacatttcctacttgagcaattaaagttactctattttttgtagcttttgctactctttcaagaattttttctttttcttctaaagataatgttaaaaattctcctgttgatcctgttacataaaatccgtcaactttttgaacattaattaagtattctactaatttgtcaatagcaacatagtcaacttctccttttgtattaaatggagttattaaagcagggaataacccttgatattttttttgcatagttatagcctttcgtaaaaatgtgatatataaacagcctaattataagtaattaaaaataacaaaaattctaattaaaaaataatttcataaataatttttaattatcttaatttaaaaaatattttcatttttatcttttcttaaattaatttaaaatattatttgcttattactcaagataaaggaaaaacatgaaatactattttttagcagatgtaggtggaacacatattaagtatgcactttcaacatcaagagcaaaatttgtatttgaaggaaaagtcagaacagaacataaaaatgttgttaaacaattaaaagaacttataaaaccttacagaaaaaatttaaaggctattggtattgcatcaactggagttgttgataatagaactcacaaaattgtttatgcaggaaataatttaaaagtattacaaggtacaaactatcgtttattagctaaatattttaatgttccaatttgaacagaaaatgatgcaaaagcagctgcatattctgaaataaaaaaagcaaataacaaaaattttgcattagtcacatttggaaccggagttggtacaggtgtagtttgaaatggacaacttttaagaggaaaaaactttttaatcggggaattaggttatacaaaactcaatgacaataatctaaacaattttcttagttttagtagttttaataacaaaataaaacaacaatttaacttttcttcaattgataatgaaacctttgataatacctatcaatcaaattctgaatttagaacaatattaaatgattatttaaaaaatgttgctttatttttagcacaagtttctatatattttgatctagatgaaataatttttggtggtggaatttcttatctaaatccttcttttttgaagaaaattgaagattatttctaccaagaattagcaaataccccttttaagacaaaaataaaaccaacccagttaaaaaacagcgctggattggtaggtgtattaaaacttttacaaactaataaattataatttttgatcagttaaaataattgtatttggatgatttaataaagcactaataggtaattgaggatcaaatttagttgattgcataaattgctcaagtgcttttttctttgctggaccaaaagcaagaacaacaatttgtttagctttaaaaattgtatcgattcccatagtaatagctttttttggaacttcattaattgatttaaaaaatcttgaatttgcttgaatggtttcaggagataagtcaataattcttgtttgtgaactttttaaactaccaggttcattaaaagctatatgtccattgttaccaacacccaaaattaataaatctaaaccacctgcttgcttgatttggctatcatattttccactttttggaaaattattagctttaaattttacttttgaaaacaaatgtttaaacataaaaaaatgataactttgttcatctttaggatctaatctgtagtactcgtctaagttaaaagttgttatttggctaacatcgattttttctgtatttattttgtttgcaaaaagtttgtaaaattcaattggagtagaacctgttggtaaacccaaattttttactaatttgtgtttaattttatttgttactaaattaagtaaaaattcgtttgcttcggttgcagtatcaaaaacttttatattttttttaatcattattaatgtccttttttagattttcaatttaatttaaaatattcataaaattcattggtttttaaaattttattgctagcaatttttctcactatgatatcaccaatgaacatttgattgattttagaagttaaagcaatttttctatttttttgttctactgtagcaaaatatacaactgttatgttatcttttgatttaacattgtaattttgagtaataacaatcacattaaatttaaataattcagcagcttcaactaaaaatctaaattctggtgagttaaaatttttagaaaaaataatcactgaaatatcttcatatttataggcttgagagtataaaacgatgtcatcaatagagtttgctaagatagaaacaaattcaatatttagtaaagcattttgcatttcttgcgctatttgtctagaagtacctaaaccatataaaaaagttatttttgatttttttagaatggaaatagctttatctagagcttcaatatctagttgtttcaaagttttttctatagaagtaaagtaaaataaatttgttttttcgacataaaaagtcaattcattaggtgctaacttttcttctctaacttttgcctgtaaaagacaacgacgaaaatggctaatatctttataaccaatttttttgatatagtgagtaattaaagattgtgcaacgtctgcttttttagcaaattcctgcatagatatttccagaaataaatttatatttcctattataaagtcttctaaatgcttttctgttttagtaagacttatatttcgtattatatgttcaatttccatatttataaattttagtttatttattattatctacaaaaaaattaaagcaaatttatctgtttttgcttgattttgaagaaaaattattataaattcgaaagtttattgaaaataatttcgttaatttctgttggatttgcatttgactgagtagctttcattacttgtcccattaaaaatttttgaactttttctttattagttatgttattttcaatatactctctgttttgatcgataagctgttctataattttatttaattcatcttttgaatacactttgatatttaaattttgataaatttgatcaaaagttaaattagcatctttattttttataggcaagatttttttaacgtgttgtaaatttattttattttcttcaagactttgtaaaacttcctttaaaaatgaaggatttatatttaaattttctcatccttgcttgttagcaataggtacaacttcagcaaaaaatacttttatagttttttccaaatccttataatcaacttcatttaaatattctcaaaagtcaatattatttaaaatttgttctatgtaaaaatctgtaattttttcttgtttaagtttattttttacttgttgtggagtagcttttatatctaaaagtacttcatttttataggattctgttaagttaaaacaaggaatattagtttcaggaaaataacgataatcaactgaatctgttttttctcttaaaattttatttaaattatttttgtcatcatatcttttagttacttgtttgactttttcaccattatttaaaagattaatttgttcttcaatttcaagtaaaatagcttttttaatattagaaatagagtttatgtttttgatttcaaccttagttccaaattgttctgaaccttcttcttttaaagataaattaatatctgctctcaaagaaccttcttcaagtcttgcatcagaaatcttcaaaaataaagctaattttctaatttcatctacataagctgctgcttcttctgctgaagacataacaggatgagttactatttcaattaaaggagctcctgctctgttgtaatctaaaaaagtagattcgtctttgtgaatctgtttagcagtatcttcttctaagtgtattctttgaattgctattcttttttcagtgttattgtcagtttctatattaataaatccttcggcaccaataggtctaaattgttgtgtaatttgataacctttaggtaagtcaggataaaaataattttttctatcaaaacaaagagcagtttctatcttcatatttaaagcagaagctaaatgaattgcttttttaactgcttcttcatttactttcggtaaagtacccaaaaaacctgaatctattaaagaaatattagtattttctttttttgaaaaagcatttaatgattcagaaaacattttagtctttgtgttgagttccaagtgaatttcaatccctataacagggatatattttttagttgccactatttttctcctctgataatgatttaattaagtcttcaaaataaagtgaatattttagtaaattagcatcatcataaagtttggattctatgcttaaattaaatggaaaattgttgtatttgcctaaaggaatactaattgaaggatttccaactaagtttgcaagagttagaataaaacctaaaatatttccatttaaactataatcagtttcaatatttttaacatctggtgctacacctacgaagctcgggaagataacacagctgtactggcttaaaatattatcgtaatattctttgataactcttcttgcttttttagctttaataaaatatttttcttgattgtcttttgaaagataaaatgaacctaaaataagtcttttttgtaagtggtaatcaaatttagatcttgtatctttaaaaatttcttctcaggtttgattttctttagtattcccaaaagttaaaccattaattgctgataaattagaagttgcttctgaataagttataatggcataaacaggatcgatgcattttaaaagctcttcgtctacattgataaattcaacttctatgccttgttgtattagtaaatgtactattttgtgaaatgctttagttacatagctttttgcaaatttaaataaatttaaaataccaactttttttggtttaaatttttctttatttgcttcaaaatcaagtgataatgaattaatttccacttctttagaactcaaatcattttcatcttttccataaacagcttttgctacttgagtagcatcatttacattgttagcaaatcaagcaacagtatctaaggatgtagaataagaaaacaaaccaaaacgagatacagcaccatatgatggtttaaaacctacttttcctacaaatgaagcaggtcttcttactgaatctccagtatcagaagcaattgcaaaagaaatattttcatttattgtagctgcagctccagaagaagaacctccaactattttgtttgaatctaaaggattataaatcggaccatttgaagaaaataaacccaatcctccaagtcctaattcatcacagtttgttattgctacaggatttgctccctgttcaattactttttgtataacggttgcattataagaaggtacaaaattttcaagtgattttgaagatccagtagatttgtcatatttgtttgcgaaatttgctttaactgtaaaaacagcgtcttttaataatgtttcattttctttaaaagcatttaatttgtcttcaaaaatgaagtaaactgtattgtttttgtcttcttttagtattttttttgctttttcaaaatttcctagatttttaatcatttattacctttttaattactattttattttctttaatatgtactgagtttttaaacaaaattgcttgattttccttcattttctcttcagaaagtactaagttatcctttcttaaaaaacttaagtcttctagtgtttcatccactctatcaagaggctgtacattctcaagatttaatttgtcaatttgttttaaaccatttaaaatttttttctcttcatctaagagtaagttaattactttttgagttggttcaaaataaagtaatttagctagttcaataattttttctttttccatgtttttcctatcagtttggtaaatttatgaaagtcttattatttaaatattttaatttaccttctaaatttaagcaaattattttgtaagaatgaagaaataatcttttattttttctccctccatattttgtatctccataaattggaaatcctaagtgttctaaagtcaatcttatttggtgttttttacctgttataatttgtgcaactttaaagttgtcaacattaaaaaacttagttattgcagtgattgatttttttttattacttacttgcattttctttaatttgtcatttttttctatattaatttttacttcaaattccttcttaatttctatatctgattgaaaaatatagtattttaagaagaaattttgttttttatttaattcgactaaagaaaagtaatttttagcataaataattaaaccagaagttgctttatctaagcgacctacatgtgaaggtacaaatgaattaattttttgtgtttttaaatattttaaaacttgattatctaaacttcaaactccatcgtgaacagcaacatttatatgtttatttaaaactaaaatattttcatcttcataaacaacatcaaagtaaaatttaatttttctaggtatatattttttagattgtttttcttgttcttgtatttttaacttatctaatttttcattagtataaatatgaataacatcatttttttgaataatgtattttttgctttgtgcttttttattaactttaatttctttttttctaaaaagtttttctatttgaaaaatactataattttctagagttttagatacaaattttagtaatgtccttccatgatcattttctttagctattatttctaacataaaagtaaattttaaattatttatcaattttaaaagacaaaaaatataatttttttaatattttcataaatcaataaaataagatatatcttaatagtatcttttatttatataaacattggataatatttattattagttgtttcacaaaaaaaccttctaaaaagaaggtttttttgtgttttctagtttaaaaacttttatttatttcatgatcgcagttattcttttatcttttgcaaaaacaacattcttgcttttttctattgctacaattgacacatatgctcctggatcacgatatatagcaggcattatagtaggataataacccggaaaagaatcgaacatatataatttcttttcagattctactaaatcaaaataaaaagaactattttcattgtttggaaaatattctgatattacatgagctccgttatctatgtagtaatacaaattatatttattaaaaaactcagttttttgtaaatcaggaaagtttctacttaaatagtcttctaatattggctttataacattaggatttgtatttttaaattcacttacagactttaaagtctttcttctttgaaattctgttgctgctaataacttaaaagattttttgtttaaatctctttgtttttctagtttttttctttcctcatgtcgtttcttagaatcatttatattttctatttgtttatcatctgctccatatctaagttcatcgtttactctttgtccaggttcaaaattctcaaatttaagatataagtatgatattcaatataaatttaaaaaataattttttttataatcattaaaattatcataaagagttttttgaatgttattagtaaaaaaatccgcttcttgttcaatatcaataatagtcttagtacctgtatcagtaaatacattaatatcttttttattattatcacaagagattaaagtagcaagactagcacttgcagaaattatagaacataaaaataattttcactttttcatataatttatcctttgaatatttcattattttttatttagtgtatatgtcactgctattctatcatctactgaatttttaaataaagcacttttgtattttttaactttaaatctatattttccagaatttcaaactttaaaatttattaattcaacattactatgaatacttgttgagcacaattgtgtttctcaatctccattgttattttgtttttcaagaatcaaatcataatcggaaaataaagcttgattttgtctttgttttgcttcatttagttttagacgctgattattaatgtgagtattatttcatttttttaattcttcaacatgtttttcgtctaactctttttgtctattatgagcttttcaaggaataaatcattctcatcaacatactttctctgcctctggttcattttccttttttgagaggataccagcattaaacattcaacttaaaactatttgaatattatcgtcttgttttagattaaattcttgacttgtaaaaatgatactattattagcggaatcatcagtagatagtgtagtaatatttctagcagcttctatcattttttcgtaatctattaaacctgcaccatatgtactgtttaatccattgctttttctttctagatgttcattcttaggtaaatgagcagaagcggctaggattacagttgcactaggaactctataagcgtcattatctaaataagaaaattgtctaaatatgtttgaaattgcaccagtaacagtaggtgctgctaaactagttccattaatttcctcatttaaaattgtgtttttaaacgttccaggagcaacaacaagtggttttggtaatccagtatgatgagattcaagtgttctattagaatatggagctatagtaaaatcatcattaatattttttcttgtcttagttgctccaacagaaattgcattgtatgctagctgtgtatcatctatccactttccatttggtatttcatcatcattgccatttccggctgcaaaaatatttaaaacaccatattttctagaaatataatcaataaaatatgatgaatcattatattcaacttcaaatccattactacttccataactgtgatttataactcttactccattatcaattaccattcattctatggatttttgtcattcactattagtgtgcaaaaaactggaataaaatattttagcattattatttatacctgttttacctgctagtatatgactgacctctgttccatgttgatatctgggcttatttcttcgactccctttatctgggtaatcattatatttagttattggtgtatgtctaaatctagattgtccacctaaaaaaagatttcttgcttctagtacacccacttttgacatatttcaattattttctaattcttttattctataagattttaaattaatatcattaaagatttttttattgtcaaaactagtatattgagaatatatatctttatctgattggattattccatttgatgaacttttgctagaagaaccacttgaactgcttgaactgcttgaaccaccagaacttcctgaacgatttggtagttcaaaattagcaaaatcttcagtcgggaagtaaatttttgattcagagtattcttttttaaagaaaattatttttttaacaaactctaatttattactttcatttataaaatcttcagcctcttttacttcatcaaaatttactcaaattataggaagaacttgactagtttttattgaagattttgctttatcattttttacgagtaatttaattttattacttaagttttgaactttttctgcaaaagttcctttttcttggctgacatccaaatagagtttgatttctaattcatcttttactttaatatctgaatttgattcagaatttaaaattttaggaacttttcaaatatttgtgatatacttatttcctgagaaatttgcagaggctaatgagttatttttagttagtgatacattatcgttatttgtataattgttaaaatcattactataagtaattgaagaaaaagagaaaattgctaagcctgagagtatagagatagcaataggaagtataaatttttttaactttttcatataagcctttcattttttaattttttaaaaataaagaaaataaatagataagttttaaaatatattgaatttgctagatttcgttattttaagatttatttatattttctttataaattttacatagtaaattaatattatgcaagaatattatacattatttttttaatttgtaattttttaatcttttcttcttttaaagtggacagtacaagaattcatttttaaaaaaataagttaattcgcaaaactttttttcgaaacaaagtttaataattgttaaaaataaccttcattttagaaggttattttttaattataaaatatcgtatcgtaatttaactttaaattttttcaaaataaatacaaattatttacttaaatatctgtcaaaaaatttataaaatactttctaaatcaaaatctgaaataaattcaatgtttttgcttttcggaaatgctactatagaaatagcagctccataagcaggaagttctgcagagtcaattccgctgtaaaatctattttttaaataaaagagtttctttttatttagaagtccaaaatacagaaaatccattctctgaggttgtaaatttacatttcaataataaaaagggtattcttctgcaataaaatataaattatatgttttaaaaacatcttcaatacttgtgtttttaaaatgtttctcaaaataactttggaagattggttcaatgactcctttgtttattcggttaaagtcattgactgatttaagtgtaatattttgtgagtttcaattgctcataaaagaatcaaatttttgattattttctttatctacagcctctcatttttctaacaactttatagcatctttttcatgattttctactatttcttttcattttctttgtatttcttttctttcattacttattctaatatctggattcacacgccaagtgtcagatgaaaatttaagagaatctctagatagtcaaaaaatgcttaaattataatgtttttgataataatcaaaattatcaaccatatctttagtgacgtatttctcataaaatttctttttgtcttcttcagtagttattttattacaagatattagtgtcactaatgaagatatagaagttgaaaatattaacaaaaacttttttcattttttcatatattttattctccttcattaaagatagtgtgagttactgaaaaaacatctgaagctgagttatcaaataaagtggatttatattgtttaactttgtatctataggttccgctttctaaaacttttaatgaactcattaatattatttatacaacgtaaacatctaatctatcaactggataagcgaaattacttacagccattatactaatctgaacaccatttaaatcgaaataatccttgttttttgtgttaataaacaataattttgattgatctatacgatcgtaatatcacttacctaaagaacgttctttaatctcattgttttcaacaccaagttttttaacaattaaataaaaacgttgtccattaaaaaggtttgtttgagaattgatagagccagttcattcatcagtaaaataatttttaatataatcttgaaacacattttttaaaatatcatttaattttgaataatcttcataattggtaattaaatttaatttaaaatctgcatttttaataaaatcattaaatttttcttgattttgaaggtatttttctctttcttcttgagtaattaaaccaggttttataaaaagatttggtaattcttcatcacttattttacctactgtttgagtagtttttaaagtatatttagaaagccgataatttttttcattaaagaatttaatatatttatctaaataacgtggattacttcttttttgaaatattaaatcttccaaagttaaatcttgtgaatttgtttgttttgcttgtgtttcaattctttgtacattaaaagctaaagcaactataactatagcttcaatagtagctatgcctgcaaaaattcatcattttttaattttatttaacatatatcacctcttgtttatttttataatataaaattctaaaattaaacttcttttttcttcctatttatttggaagataaattttacataatagcactaacatcttcttcattagcaaattcaatattttcagctttaggaaatacagctatagatattaaagccccaggaggtccatactgtgcattaataatttctggattataatttgaacgaattaaatacaatttcttttgagtttttactaaatcaaagtaaaacaaattagtttgatttaatctcacatctccactataatcaccactttcatctacatagtaaaacaagttatactttttaaaaaaatcagaataatttaaatttggaaaatttatttttaaataatcttctaaagcaggtttaattattttaggatttgtgttttttaaatctttttcagattttaatactatttttttgtaaaaatcaactgctgttgaattttcaaaataaattctgttttcctcacgttgtttttttaatttctctctttcttctgtgcgcaatttatcatcttttatatcttcaatttttgatttttcttcatattcccttcttgatactagccccttttcgggatcaaaattttcaaaataaaaagactttcttggcactcaataaaaattgaaaaaatatttttctctatagtatttgtaattgttaacaagattttcgtaaacattatctaaaaaaaattttacttcaggtttatctctgttcgaaatttctttttttggtgttttaggatttagaaaattttcttgacaagaaatcaaagagaatataccgacagtagcaacaaaaggtaaaaataaaagttttatttttttcatatcaccgcctttataattaatttatattgactaatttgtagtcttaaaaaaattgttttttatatttgatatattttaattttaactaatttttcaaaatattcattaaattaaaaaatcttaaatatttaataactagttcatttttttgctttaattatcaaaaaataaagcttaataaaaattaatttaaactatgattttaaattttgtggaaataaaaataaaatattatagtaagttcaattcgcaactttttaattgcataatgttctttttgcatttttattaaatatgttaattatcataatttaattaaaaaaatacgtttttatatttataaaaacgtatttttcacaataaaattatttttaaaaaagagcaaaagtaataaattaaaataaaagtttaaaaatattaattaaaatgattttttagttgttttatagattcaccatttttatttttaacatttgctaaagctctgttatatcagagaattaatgtagttaaagattgtattatattttctattttttcacctacaaattttacatcctcagttaattcatactctttgtcagaaataccatattttattctaatttttggtagttcaggtcaatgtttcttcttagcttcactttcaccttctatgcttttaatgcctctgatgtatgaaccctttttgactattatagtttcagaatcatgtatatataaatatatttttttatccaaataagaatgattttttaaattagaatagtcaaaaattcattctgaagttttacttatatttttttatctgattttttagataatcatcaatttttaactaaatcagaaagataaattccattttcatccgtaattaatttgtagtcttcttcaaaaacaaagtctcaataaggatttgaagcagcaatagacttataacaagtaagtttcattaaaattttttctaatgaatttctatttctgttaaatgtcaaaactatgtcttttgataatacttccatactgtcggattttaaaaactctaatctaaatttagttacactattttgtaaatctaaaggtaaatttttaaattcttcgctttttatacttcaaatataagaatcttttttaattgttatattttgtgaatcttttataaagaaaaatatttttttagatgagtcaggatatttaaaagttaatgttaaattattattcgcatcaaaaaaatcttttattaaacctttagtaaagttaaaatttggtaatttttcatttcgtttttcagtctctgacagtttttcattaaatagagttttgaattttttactttcttttataaaatctaataaaaagatttttctagacgcaaatagaattaattcgaaaatttccttagcgtccttttttgcactttcacttaaattagtttcgttatttgttagtttgttatcaggttgtatcttattattttgaaattctcaaatgaatttattttctaaaagtaaaagtaggtcagtagaagcatatgggttctgaataccaaaaattcatattttttttatttcttcttttttaaagtgatcttgaattctatttaaaatttctctactttgacctatataaactccagaatttgaaattcatatataaatagcaattttattatttaatcattcttggaaatcacctattctctttttgtcttcttctctaatttttccctttgttaaaccaaaatatagttttatttcatcatcagataaataggaataaaacaaagtggtttctgctttttttaatttaaattgtacaaattcgccatattctttttcagaactgtaagttaagttatttatttttgtgatcataatttcctcgtcttgaatacatttttaagataatactataaacaatataattagaacaaaaaaaaaaaaaaaaacaagcaaattgtgagcagatccccttttcttaagaaaatagaaaaggggatctgctcatttgtggtttttgattaccaaatttattttttaattttctttaaaataatctcttaaagttttattatcgttttttatttttaaatcaccattgctcacaaaatatgataaaaatgccattaaaattttattaacagagcaattaataatttccacatcttcttgtatttgctgatatttttgagagtatgttagatatttttcaatattttagctcttttaaaaacgtcttctttagtgcgcagtcaatttctattattaagcaaatggttaccagggcgtataatataacttccttttttaacaattattgtgttgttatcattacttttaaattcttttataaaaatttcaattggatatttagattcataagttaaagtaataccttgatttaatttaaaaaattcaagatttcaatcttttatgtttgtataagtattgttgggttttttcaaaggaaaaggaaaaatctcgttattttgcgtagttatattttttttagaagtgttttgaatagttgcttcgtatctttcatcatatgtttgtttattctcaacatcattaattaattctttgttatttgttgctgtgccaaaattatttgaattttcattttttatttcttgtacttgtacatttttaatataagaattttgtgatttttttgtttttttaaagggaaataaattaaaagaacagtaaattgtttcacaaatatttataaattttcttagttcttcttcctgttcttcatttaagcgggtagaatctccgctctttttattttctaaatctttctctaattcatactgatcaattaattgactttcgacaaatttaaatgaatcattatatgaaccaccacgtttttggtcaaaagtaaaaataaatattttttgaatatcatctgatcattcttttgttttagtatgattattaaatctgtctatataatctccttgacctatatattttttaccattttttaaaatatatatgtaaacaccttttcaatttaattgatggttattttttataaatgtatttttttctttaaattcttcagatcttatgtaatcagacccaaatttttcaatattaaaataataacaaacaatacttttagaatttaatccgctaatttcgctacttttagtgtctaagtataaaatttcgttatttttgttgaacgaaatatttgtattttttagagttatattattatatgctcaaaacataacttactttctttgtagaatagaatatgattttaaattttcccaaaaaaaaaaaaaaacaagtaaaacgaatcgataagaagaaaaaaccactgaaaaatcagtagtttttacgattattatttctatttgttttctttaaattcttcaaaatatttatatattcaatgatttgtttcttttattttgagagctccatctgctcaataacttccattaaaagctctaactatatttgttattttagtattattgattattaaatcttgttctaaaataccttcttcttttggtaagaattgttttcttcaatttttagtttctttatttgcggtttttgattcagggaaaataaaagaacctttttttactataaaggtgttatttgtattattttcgaaatgttcaataaaaatttctacagatttaccttttgtttttagtaataaggtaattttgttatttactctgaaaaaattttcaagccattcatttattgtacttaaatctttaattttgttttttggttgttgaatttctacagaaaaattattatttgaaatagttaagttttctttattattttgagaaaagtcttcgttttttgttcttttacttttatttatactttttcgatcaattaaatctaagttgaaaaatttaaaagtacgctttgcttcttctactaatttcttgcagtatacttctgcgtttgggtttaaagtttgttttacacattccttattgtgagtatttgctaatccaacttcatcaattaatgctcattctatatatttagtatattttttatctcacttttcttgtttttgttttttggtaatgataaatactttatcaatattttctagtcgaggaacacttcctcttgtatgttcagaatatctatgataatacttaccttctcctatataagggatgccattggaataataaatatatatacctgttttatattgattagaatcaaagtgagcatcatttttgaaaattttaggtccgtaattatcttgatattctttagaagttagaaaaaaatcttctattaattctttactatttaagtaataaaattctaattctcatttgaaatcttctgattctgcagttgttaatgggtgttctgaagaaaattttaaaaacattaaatcattttttttattaaataaaattcttgttttaccgaatatagattttaatttgctattcataataataaattaaagcaaaaaaaaaaaaaaaaagcaagaaaataagcagatccccttttcttaagaaaatagaaaaggggattttttatgaaatattcattagaatttaaattagaatgtgtaaaaaaatacaaaaaaggaattgaaattaaaaagcctgattttgctaatacaagtcagaaaaattttttacatcaagtaaatttttgagaaaaaatttatgacaaattaggagttgaaggacttaagaaaaaaccacgaaataaagaatggactatagaagaaagattaaacatagttaaaagatttttagctggtgaaccaattgttaaaatttcacttgaaaataatcttaatccaagtcaaatatctttttgaacgaaaaaatatttagaatcgggaattagtggtttagaattaaacaaaggaagaccaataatgaaatctaaaattattaatgataaacgttcaaaagtttcaaaaaatttaaatagtaaagatcaatctaattctctaacatctgtatatgaagaactcaaacttcttaaagaagaactcaagcatttaaaaaaagagacaaaaaacttggaaaaagaaaataaacttttaaaaaaggaaaatgaagtactaaaaaaagtgaaaagccttggtagagatctttgactcaaatcaaccaaggcaagaaaaataaaaaatttataatagagtaaaagctgacaaaagtcttcgcttaactcaagtattaaaagagttttctattcctatatctactttttattatgaactcaaaaagagaagattttgacaagaaaaatgaagaaattataagccaaatgaagcttatttttgatgaaaataaagcaagatatggaaaaagaagaataaaagctgaacttaataatagaggctataaaattggacttaaaaagttcgcagattaatggaaaaattcgatctcaaagcaatttgtcctagaagaaaatacaaatcttacaaaggaactgttggcaaaattgcagacaacattttaaatagaaattttgtcgcaactcaaccaaatcaaaaatgaactacagatgtaactgaatttagcggatcatttggaaaagcatatttatcaccaattttagatatgtttaatggtgaagttattgcttgagatttgtctacaagtgctaacatccaacaaattagaaaaatgcttcaaaaagctttttccaaacacaaaaatcttgaaggtttaatttttcacagtgatcaaggttgacagtatcaacatagacaattttcagaaaaattaaaacaaaaggaataattcagtctatgtctcgaaaaggaaattgtttagataatagcgttattgaatcgtttttggaacattaaaagagaatgtttttatggtcgcgaaaagaatttttaacttttaaacaacttcacaaagcaattgcaaattatatttattattacaatcacaaacgaattaaagacaaaataaaatgaatgtctcccattaaatttagggaaacattcatttcaaattataattaattaaaacactcaaaaattttagaagaaaagggtaccacctcaaaaaaacgaaaacaaaaatgcagaaaaatgaagagagaaagaagaaaaaacaaaagaaaaacgaaaacaatatagagcagacccccttttcttagaaaaatagaaaaggggattttttatgaaatattcattagaatttaaattatcaaattcttttttgttttcgagaataaaatgagattgtctattatgtttaaaaaaaattctcaaactttaatatatttgcatcttgtattttttgttctgattcagatagtgatcttcagcgcatatcatcttttaagtcctgatctggtttatctaaaagtttaagcatttctctatgaagtcaatatgaattcataaaatactttttctgatattctttaaaatttttattaatattttttaaaattttattttcaaaaaattcttttttctcttgtgagattattctttttcttgaagtaatttattccttgatcaaaatttagtccttcaaatggatttttattttcctcatctgtatctgtaatatttgttatattatcatcttgttttatagcgctattattagttgaatcatctgactttggtcgggaaagatttgtagcatcagataatgtattttctagattagaagtgagaatgtcagaagagtccattttgtctttattagcaaatttattagatttaattttatttgtagcattaaagtcacacgctattgttaaaacacttatagaggggattgaaaatattaagcccaaaatctttatagaatataaatttattttttcttatttttcaaattaatctccctttatagtttttataaactttcttcaaatttgaagcaaatttaatcttaaaaataaaaattatacttgaactgattctataactttaccaatatcagaacttttaaaaaatgaaacattttcagatttttttaaagctataatactaatttgtgctccatgatatcaaagtcttgctggaatttcatcaggtcgttgcggcactacaaaatataattttttagacttgattgaatcaaagtatcatcaacctatatcttgttttcgtagataatctgaataaataacactattaccagcaaaataataaaaattatattcatttaatacttgttctatgtttttgttagaaaaaaacttatttaaataatcttgaaaaataggttttaaaatacttgtatttaggttgtcaaattcttcttttgttttaagaatataattagtaggtttattggaagtaaaaaaatttttaaatttttctttattttcttttctaatttttttttcattttcagaaagttgtgaatcatctaaataactaaaaaaatcatttgaaaactttttatcaaattcatcaatatattgaagcgtattctcattaagtaaatatgtatgcataaaatatttttgttgatattcttcaaaattatcattcacttttttgagtattacattattaaaaaagtcatctttaacttttctttttgcttctcttaacttgctatcaaattcatcatttgattcagatgtatgattatttaggttgttatcaatttttgtgtctttgcttgtaatagttgaatcaatatctattttatttgaaggatttaaaaaatcagatgatcctattttttgcctacttaaaaattttctgttattcattttaattgcttgatttccttcacatgacaacattaaaaaagaagtaataggaactaaaataattgaggcgaaaattcctaaaaaagatgaaatattttttctatttttcatattaattttcctttgttattgtgtgtgttacggcaattgaatcatctattgaattgttaaataaagttgttttatatttttttactacatatctatacaatccgaagtccctggttttaaatttaattaattcaacattacttcttatactctgagaagaaaatactgattctcatccccctttatcgttaattttttctaaaactaaatcataatcagagaataaactatgttgttgtctactgtttgtttcttctcgttgcaatctattttcatttatatgttgattttttcactcttttagctttagttcataatcgattccctgtgcagtttgttttgcgagtgctcatgttgggaaaagtcattctcatcaacttggatgttgtaactctggtttatcttctttttcttttagtaatccagcgttaaacattcaactaagtgctatatttaattgttgaccaggatttaaagctaaaattttacttgtgtatataattgcttcattatcatttttagaaactgacattgtgtgaatgttttcagcagcttctatcattttttcgaaatcaatcaatcctgctccataagttttatcaaaaccattactttttttatttacaattttatatttaggtaaatgtgctgaagaagctaaaatagacattgcaattggcactctataagtatcgttatttaaatatttgaattttttaaaaatattagatatagcaccagtaaccactggagcagcataactagtacctaatatagtttcggaattttgtaaaattatttctccaggagctaccactaaaggtttaggtaaatctaaatgatttggttccaaatctctattagaaaaatatgaaatatcaaaatcatcatttacattttgtctatattttgtggaacccacagaaattgcattatatgctaattgttttttatctattcatttactatctttgtctggattatcataaccattaccagcagcaaaaacatttactacaccatattttctggaaatataatctataaagaagctttcatcattataatttataggatttatagaggcagatccataactgtgatttattactcttacttcattttctaacaccaatcattcaatagcattttgccaagaagaattatcaataaaattagaaaaataaatttgactattctgatttattccattttttccagaagcaattatagacacatcagttccatgatgctcacttgtattttcgggtccaaatagttttatttgagatgaatttttaaatttatatttattagataaagtagaagatcctacttctaaaatccctactttagaactaggatacaaattatttagttctatgtttctgtagaaatttaaatttatttgtttcaaaagtaaatcactatttacatcggaaaaattattatttttataatcattaactcataaactaagttttgaatttggatggttttttgaatgtaaactattatttttggaaagaacttttttataaaaaacaattctttttacaaaatctagtgattcaacatattcaataaattctttggatttttctaaattattaaagtaaaaccaaacaatagggagtaatttactggttttgacttttcattttatgtttttaattttgaagccattttttattttatttaaaagtgaatctattctttcttctagattgcctttttctttaaaaacatccaaatagattttcaattcgatattatcagagactacttctgatgaattttttacattaatagatttgggtgtaggaatgtttcattcattaactacaaattttttactagcaaaatttattgttgctaatttttcattattaattaagtatttactttgattaaatgaaaaaataggtaaaaaaaccaacgaagttattgtacctatcgcaaatgaaagtttaaaaaattttttaattttggtcatataattctcctattcttgaatttttattaagaaaaacaaaatatataaagaaaattaaattttgaaataaatattcaattattttaaacaagatgtatatggatttttttcttattttgtcttcttttttagatttgtttatgttatttttttttaattcttgttttgattctatcatttttttaaaatatttaattaaatttaaaaaaataaataagataaataatttttaagtgttattattctttgaatttagattagtaaagttttttcataaaaaataaaatcacacatttgagcagatccacttttcttagaaaaatagaaaaggggatctgctcactgctccaactattcatcttaattataaaaaattaaagtttaaaaaaattacattaaaaaattattttaaatttaatgaaaatgaaaaataaaacataataagttaaatttacaatttgtttcattgaataacgtattttctgtaatttttaacttaaaaacaacagttacaacaatttaatttaaaaaaatacgttttttaaaaaacgtattttttaataataaaatgctatttagaaaaattaaaactaataaattaaaataaaagttttaaaaatattatttaaaattcttagataagcgcagcaagtcatcaccaattttatttttaatgtgtgctaagacccttgaataattacgaatatatgtagtcagcaaccttattatatctacaattttttacacctttaaatgtaatatcttcacttaatatatgttcttcatcagaaataccgtattttcttctgatttctagtactcttggtcaatcttctcttttgcctgaagtttttacattttctatgctttttatatctctaatgtatgaacccttttttactattatagttgaagagtctattacatataaatatattttttgatttaaatgatgatagctttgtagttctgaatagtcaaaagttcattctgatttatttaacacattttcttttgtaattttttcatttttagtttctgtgtttttatgagaaacaatttcgttattgtgggcttcaattggcttttgatttgttgttatttcttctgattttgagatatcttcagttttctctacagtagaaatatttaattctttacttatatttataaaattaaaagaaaatattttatttatttgcaaaatgattttataaaactcttcagcttcttttttgggcttacttcccaattgactttcattattcttttcttggacgtttttatatttgatattattgtccttaaacaaagaaattattttattttccaaagctttaagtaaatcagtagttttatgctcatcaggaatttcaaagattcataaattgcttatttcattttgtttatgatgtttataaattcgttttaaaccataactactttgtccgatataagctttttgagtatttttatcacctgcaattcacacatatactataaaagacgataataagtgtttacgtaatgtgagtttatcatttatttcttcttctctcatattttctctaatattatttatttcttcaagagagctacaaagtattttcaattctttgccagtgaaataatagtaatttagagttttttgattcccttgaatttttactctaaaatctattccaaacttttcttcataactataagatgaatcactcaatttaattttcataattttttctccgtatatataatacaaaaaaaaaaaaaaaaaaaaacaagtatagtgagcaaatccccttttcttagaaaaatagaaaaggggatttgctcagattttcagtagttttttattaagttttattttttagataaatatcaattttttactaaatcagaaagataaactccattttcatctgtaattaatttgtagtctttttcaaaaacaaagtctcaataaggatcagaatcagcaatagacttataacaagtaagtttcattaaaatcttttctaatgaatttctatttctgttaaatgttaaaactatatcttttgataagacttccatattgtcggattttaaaaattctaatctaaatttagttatactattttgtaaatctaaaggtaaatttttaaattcttcgctttttatacttcaaatataagaattttttttaattgttatattttgtgaatcttttataaagaaaaatatttttttagatgagtcaggatatttaaaagttaatgttaaattattattcgcatcaaaaaaatcttttattaaacctttagtaaagttaaaatttggtaatttttcattttgtttttcagtctctgacagtttttcattaaatagagttttgaattttttactttcttttataaaatctaatgaaaagatttttctagacgcaaatagaattcattcgaaaatttcattagcgtccttttttgcacttttacttaaattagtttcgttatttttttgtttgttatcaggttgtatattattttttcgaaattcttcaatgaatttattttctaaaagtaaaagtaggtcagtagaagcattcggattctgaataccaaaaattcatattttttttatttcttcttcatttttaaagtgatcatgaattctagttaaaatttctttactttgccctatataaactttagaatttgaaattcatatataaatagcaattttattacttaatcattcatagaaattacctattctctttttatcttcttctctaatttttccatttgttaaaccaaaatatagttttatttcgtcatcagataaataggaataaaacaaagtagtttctgctttttttaatttaaattgtacaaattcgccatagtctttttcagaactataagttaagtcatttatttttacgttcataatttccttgtgttgaatacatttttaatctaatactataatcaatataattaaaacaaaaaaaaaaaaaagcaagcaaatagcaacacaaacaaagcttaaattgatattaataaatttttaaaaatattttattttgtaagttatttaatattataattcaagcataaaaaggagaataatgatagtttcaaaagaagaaatatttaaaattatagacaaatatatgagtcaagatgaagagttttatcttgaattattaaagaaaataataaaagaaccagaaagatattttggtgtgttcaggctttcaaaactaaaaaataaattgatacaaaatattactcaaagtcgagaaattagatttggtaatattttagaagatattgtcagtaaatatctagaaaaaatgggatatgaaaatataaataaaaatttaggaaaaaatgaacaaaatcaagttttaaaaacagatcaattttttaaaaataattcgaattctaatattttatatatggttgaaatgaaggtcagagatgatcatgacagtgcaaaaaaatgaggagaatttaaaaaatttaaaagtaaaatttctttgataaaaaaacaaaatccaaataaacttattaaagcaattatgtggtttgtagatgaaaattttgacaaaaatcaaaaatattatcgagaagaaattcaaaaattaaatatcgaaaatgtagaattatatttattttatggttcagaatttttcagtatattaaaaaatggtaataattcttgaaatgagttaatagattcaataacagattacaaaaaaaataaaatccaaaatgaaattatagatttaaatttcggtaaaaatccagaagttttaaaagcacttgtaaaactagggaataaaaattgaaataaacttatttcagaagatttaatttataaacaattaaggcaagaaatatttagtgatggtgataacttgtctaaagcaaaaaaagaaagagaatctttgcaaacaacaaagaaaaaagaaggaaaaaatggacaattcagaaataaaaaataaaattttacaaggagattcattaaaagttttagcaactataaaagatgaaacttttgatttttgttttgctgatcctccttactttttacaacttgaagaaggtaaaaaactttatagagtagaaggtagtgagtttgatggttgtgatgatgaatgagataaattcgattcaatggaagaatacaaaaaatgaacaaaagcttgactaacacaagtgcgcagagtattaaagaaaaatggttctatttgtattatttcaggtatgcaatctatttatgaaataggaaatattttaagagaattaggtttttgagttatcaacgacataatttgacaaaaaactaatccaaccccaaactttggaggcactagattaaacaattctcacgaaacactcatatgagcttcaaaatctaaaaaatctaaatttacttttaattacaaaacaggaaaattcctaaacaatggaaaacaaatgggttccatttgacagttttcagtatgctcaggtaatgaaagattaaaagatagcaataatcgtaaacttcacaatactcaaaaaccagaagctttgctatatcgaataataactttatttactaagaaaggtgatttaattttagatccttttggaggcacaatgacaacagcagctgtagccaaaaaaacagggagagattttacaacgatagaattagatcctacttatattaaatatggtcaaatcagagtagacaatgtaaaagaagatttaggtgatgtagaaaacgcagtttttgacattaaacccttaaaagtttctttatcagaaattattcaatcaggttatttaacaacaggtgaaactttttatcataaaaatggtgaacatgctattcttacaaataataaaggttatctaacatataaaaatgaaactaactcaatacacgaaataactgccaaaatgatgaacagaaaagttagagtaaatgcttttgattatttatatgtaaaaagagatggtaaattagtttctatttcagatattagagatttatatagagaacaaataaaattatctttgttaaaataaatatatagtaaataaacaaaaatccttcatttttgaaggatttttgtttatttttctctttgttttcatcgttgttgaagtatttcttctaatgtataaccagatttatttctgagaagtttatatatattagctccataaccaaaaaaggcgccaaaaacttcatataaagacttattttttggaaaactaatatcagattttatttctgtgtgacttactaaattgtattctaaacaatttgatttgataatgtctgaacaatatggttttaatggaaagacatatgaaccagcttttacaattattattccgttttcaatttcaactgcaatttttaaagaattttttctgtaaaataagtaaatatttttattttcttctaaaaataaatctaatttatttgagttacttaattttcgttttttagtttcaaaagtatgttttttagatctagaaattgtatcttctaaatgttcgaaattaggtttagataaatcatttatatcaattgttttagtttcaaaagtatgttttttggatctagaaattttatcttctaaatgttcaaaagaagtttcagataaagcatttatatcgattgatatttgagttccaaattttttcgaaacccaataagttaaaaaatctgcaagttttatatcactgtctttaacttttaattttaaatatattttttctgatcgaccaagaaaactagcaactaaagttcttagattaacatattttggaaaaggaacatcataatttaattttttaactccaattaattttctttctgaaaaataatgatttctaaatttacttaatcattcaattctttgggcagattcccttttcttagaaaaatataaaaggggatctgctcaaaatgcaagaaaaaacaaaaaccactcaaatttatgagtggtttttgattacaaaatttattactttattttccttcaaaataatctcttaaagttttattatcgttttttatttttatctcatcattgccgggctttttaccagaaaacgcacttaaaattttattaacagagcaatcaataatttccacatcttcttgtagttcttgatgtttttcagaatttatttcatatttctctaatattttagctgcttcaaaaacgtctactctaatccggtgtaattttttataattttcagtattgacattaagaggtttaatataacttccttttttaacaattattgtgttgtcatcattatttttaaattcttttattaaaatttcaatttgacgtcttttgcttatataagttaaagtaataccttgatttaatttaaaaaattcaaaaattcaatcttttatttttgtataagtattgtcgggttttttgaaaggaaaagaaaaaatcatctcattttgtgtttcaatagaattttcagttatagttttttcttctttttctttgatattttgatttttttctaaatgtttttcataaagcttgtttaggctaattccttcaagagtttttaactcatattttgtaaacatctgaccataaaaaacttctataatgtaattaagacttttgttttttatataaacatctttttctaatttacctgtagacaaatttacgttatattctttagaaaatttgtttcttttttcttgtatgttacttcttgttttctcaaataaatctcttttatttatatctcatataagtgaatcttttttgactatagctttaaaatcatctttattgatatagttaataatttgaataattggactccccttatggcatactaaaataatattaggattgtcttgaaggtactgagtgaatcaatcttcttttcttcttttttcttcattagtttgtctccgggttacagaatcaagttgttttatatttccttgaacagagctagaaacaattttgtatgtagttggtttttgttgttcattatgagtgtttttgtcttcatttatatagttattttgtgtttcaatagtcttttcagttgtagttttttcttcatcttttttatcttgtgacaaggaagtcagttttggtacttcaaaagggaaaagattaaaagctttaaaaattaattgagtttttttaataaattctattaaactattttgaaaattttttgctaaatgagttgttacaccatctattttatttagtccccattttttgctctgacatctttcaattaaatctttttctacaaatttaaatcagtctgcatcaggaattgactcttcctggtctaaagtccaaataaaaatttcttctatatttctccctcattctttttctttaatatgacttttaattctttcaatatatctacctgttccaatataaacttttttatctttggttttaattaagtaatttccccgccaaaaagcaccgtcttttgtattatcatccttaaaatgtccagcatcataatgaacattttttgtttcttctataaagtagtggttaatggcatcacctaaaatatgatagcaaacaattttacgtttattcacttcattttctttatgttgaccctctcatttttcaaaacttgttatttttaaaaatattttcttgttgttgttttttcatcaaattgggtaataacttccttaatataaagttgattgaacataattttaaattaaaccaaaaaaacaagaaaaaaacaagaaaaatcaaaaaccactcaaatttatgagtggttttttgataacaaaatttatttttcatcagccttaaatcgatcttctaaagttttgttatcgttttttatttttaaaacaccattaccgttataatctaataaaaatgacattacaattttattaacagaacaattaacaatttccacatcttcttgtagttcttgaggtttttcagaatttatttcatatttctctaatattttagctcttttaaaaacgtcttctctaacccggtgtaaatatttatcactaatatggatactaagaggtttaatataactcccctttttaacaattattgtattgtcatttttacttttaaattcttttataaaaatttcaatttgatttccagaactacgagttaaagtaataccttgatttaatttaaaaaattccaaaattcatttttttatacctttttaggtactcgtattaaagaatacagctcgttatctttgttgaaatcatccttaagtaaatcgtaaagtgatttaccatctgtattttttgtgttagtataaaaagaattttctcaaaagtatgcataacaagtcaaaccctttaacactgtttcaaagcttctaccttttatttttatacttttagttagttgagtttgttcaagaggtatattgaattctgttctgaaatttatagttcattgtttttcagtttttggattgtcgtaaacacttcaagtataggaacctttttcaatagttatattattagaatcatgaactaataaaaatatttgcttatcagaaccaggataagtaaatgttaaatataaatcagtgtgattatctaaaaattgtgctactaaaggttgttttattccagatggtggaggaaattttaatgttttattattattttcaagtttatattctctattttcttctctattattagtaatattattaactttattatgtattgttgctacttgtgtttgtatattatcagattttatatctatttcttcatcttttgaatttataacttttatttcataattattttttgatttaaatgggtaaagattgaaagttttaaacatcaactcactttgtttaacaaaatcttctaaactgttttgcacttcaacaactaaattagttttgttaccttcttttttattgtatttttcatcttttgtaaatttacttattaatattttttcaacaaattcaaaccatttttcattatgtgttccttttgtctgatctaatgtcaaaataaaaacttcttgtattatatttcctcagagtttatttttaatatgttctttaattctttcaataaatttaccttttccaatataaatttttctttccttagttagaatgatatagttccctaaccattttgctttgttggttgtaaaatctgaagaagtgtaagttcctaattttttattttctggactttctgaaaaataatatttaattccatcattcaaaatgtggtaacaaaatattttatttttctctacttcgtctgaattcccaagtttattttttcttcatttttctgaacttattattttcaaaaatactttttcgctattgtcattccattgtacatgagtagtttcaatattaaattgattaaacatatttttttccttttgttaattgcattttataattttcccaaaaaaaaacaagaaaaaaagatgagcagatcaccttttcttagaaaaatagagaaggggattttttatgaaatattcattagaatttaaattagaatgtgtaaaaaaatacaaaaaaggaattgaaattaaaaagcccgattttgctaatacaagtcagaaaaattttttaaatcaagtaaatttttgagaaaaaatttatgacaaattaggagttgaaggtcttaagaaaaatccacgaaataaagaatggactatagatcaaagattaaacatagttaaaagatttttagctggtgaaccaacgattaaaatttcacttgaaaataatcttaatccaagtcaaatatctttttgaacgaaaaaatatttagaatcgggaattagtggtttagaattaaacaaaggaagaccaataatgaaatctaaaattcttaatgataaacgttcaagagtttcaaaaaatttaaatagtaaagatcaatctaattctctaacatctgtatatgaagaactcaaacttctcaaagaagaactcaagcattttaaaaaaagagaaaaaaactttgaaaaagaaaataaacttttaaaaaaggaaaatgaagtactaaaaaagtgaaaagccttggtagagatctttgactcaaatcaaccaaagcaagaaagaataaaaaaaatttataatagagtaaaagctgacaaaaaccttcgcttaactcaagtattaaaagagttttctattcctatatctactttttattatcaactcaaaaaagaagattttgacaagaaaaatgaagaaattataagtcaaatgaagcttatttttaaagaaaataaagcaagatatggaaaaagaagaataaaagccgaacttaataatagaggctataaaattggacttaaaaaagttcgcagattaatggaaaaattcaatctcaaagcaatttgttctgatgaaaatacaaatcttacaaaggaactgtaggcaaaattgcagacaatattttaaatagaaattttgtcgcaactcaaccaaatcaaaaatgaactacagatgtaactgaatttagcggttcatttggaaaagcatatttatcaccaattttagatatgtttaatggtgaagttattgcttgagatttgtctacaagtgctaacaaccaacaaattagaaaaatgcttcaaaaagctttttccaaacacaaaaatcttgaaggtttgatttttcacagtgatcaaggttgacagtatcaacatagacaattttcagaaaaattaaaacaaaaaggaataattcagtccatgtctcgaaaaggaaattgtttagataatagcgttattgaatcgttttttgtaacattaaaaagagaatgttttatggtcacgaaaaagaatttttaacttttaaacaacttcacaaagcaattgcaaattatatttattattacaatcacaaacgaattaaagacaaaataaaatgaatgtctcctattaaatttagggaaacattcatttcgaattataattaattaaaacactcaaaaatttttttccagaaaagggtaccacctcaaagcaataaaaatttcctttaattttctatatttacattaaattttttgagtttaattgttttaattttacttttctcaaaaataaatcttgatatggctgaatcttcagtatgatggtacttatcatcatcaaaataaattgtagttatacctgtttgtgcaataactgttgcacaatttgaacaaggaaataaagaaacataaagttttgcatcttctactgtatttaagggtaaaatggaatttaaaatagcatttatttctgcatgaattacatatgaatattttacttcgctagctttattagaatctttagatcaaggaaaatcaatatcattaccttttggcataccattatagccaagccctaaaactctattttgtttacttactatgcaagctccaacttgagtgttaggatctttgcttctttttgcgcttatttttgctaatgctaaaaaatattcatcccactttattgttttatttttcatttgtacctctttattttatgcacatattttaagaaatctatttgatctgataacattataattttttaaatcttttttaaaagtatatttaataaacattattaatttattaattaaaaaatccttcatttttgaaggattttttatcttttatttagttatgtcttctaaaatatctactatatcataagaagaaaataaagtaatatttttatcttttggtatggaaaatattaaaatggtatgtccttcgcgtccaatagcatcattatcctctcttccaatgtgtttgccattttttacttctgaatcaataatataccatttttttgttttatttattaaaccaaaaaatggtgttaatcttaaatctgtgtagccaggatcaaatctactttcttcaaaaactatttttgtataatattttaatatgtatatttcattatttgagagtacttcgtctatattctgttgtccgaaagtgtctgaaatatatttattgaatgcaggtaaaattttagacttttccaaattttttatgtcttgagaattttttacaaatacgactttgttataagaaaaagggatttttaaatttgattttttttcttcttcttgcatcacaaaattcatttcttctaaagtaagataaccacgatcaaaaattttatcggtataatcagaaattcaataagtcttcaaattaaacatttttaaataaggagttcagtcttcgatgccaaagtgtaataaatttttatcaaaataataaattttgtcatctaaatttgctttatttttaagaatttctattttattatccaatatatctttgtttttattttcattattagaaacattattattacaagaaattaaagaaaaagtagaagctattaaagttaaagaaaaaaatattattttattaaatttcctaattttaaccattatttggatttaactccttttattatataagtaattgtaccaatatttttcactgaatttttaaataaaacacttgagtattgtctaatatgaattctgtaagttccaggttgagtaattttaaattttatctattggtatcgttttacttgtttcaatttttcaatttatattagtattttttaattacttgattatgctagtggaactagtgaataaataaaaaactagtgaaacaaaaattccagcagttatgaacaattttagaaatttctttaattttttcattttcgcttcctattttatattttttctataattttaattgctttagtatatcataaaaactattaataataaatgttaaattttttgactcattattttaaaacttaactaaattttcaaaagaaaattactatgttaaaaattaaaaaaatccttcatttttgaaggatttttatcttttatttacttatatctttaacaatatcagctatatcataagaaggaaataaagtaatattttgatcttttggtatggaaaaaatagttataatttgtccttcgtgacctacaaaatcttttacatctctagagtgtttaccattatttcactctgtatcaataatatataatttttttgtcttttttataaatttaaaaaatggttccaatcttcatccaacgccatgatcatatgtagaaaaagaaaaacctttgtaataagattttaatatgtatatatcataattagaaaaaacttcttccattgtcttttgtctaaaagtatctgaaatatatttatttaatgtaggtatcacttttgatttgtctaatttttttatatcttgagaatttttgacaaccataacttcattataagaaaaaggaatttttaaacttgaattcttttcttcttctcgcttcaataaattaatttcttcaggagtaagatagccacgatcaaagattttattactataatttgaaagtcagtaagttttggaattaaaaatctgtaaatattgatttcattgttcacttcgaatgtctaaaaaattatcagaaaaataatcgatctttttctccaaattttctttatttttaagaatttctattttattatccaacatatctttgtttttattttcattattagaaacattattgctacaggaaattaaagcaaaagtagaagctattaaagttaaagaaaaaaatattattttattaaattttctaattttaaccattatttagatttaacccctttttattgtataagtaattgctccaatatcttttactgaattttcaaataaaacacttgagtattgtctgatacgaattctgtaagttccaggttgagtaattttaaattttattaattcaacattagtttttgtagcaacagactttttaacttcttttcaacttccgttttctcatttttctaaatacatatctaaatcagaaaatcaattatcattttgtttcttaagtgtagcactttgtgttaatctggtattatcgatatgagtacttcttcattttttcttttttaattctaataattctatttttttatcagttgaatcagactttgtcgattttttagaatcaagtaaaaaattaatatcttcatctgtaaattcaggttcagatctctttaaaataccagcattaaataatcaagcaatagaaacatttatttcatcatttttatttaatcaaatattattaatattaaataaatctttatttacatttttttcagaaatagaaaatgtttgaacatttttagcagcttctaccattttttcgaaatctattaaaccagccccataagtgtgatcaaaaccattagaatttaaatttgataaattatagttttttggtagttgagaagatgcagctaaaataaccattgagataggaactctaaattcatcattatctaaattagggaatagttttaataaatttgcaagtgaggcggttactattggtgcagaatagctagttcctcttttggctcctccttgaaatttaatttcaccaggagctacaactaatggttttggaagatttggaaattttggatgtaaagttctatttgaaaaaggtgttatttgtataggtttatttctattttctctaggttcagtagctccaactactatagaattactagataattttctttcatcaattcattgtccttcagttttgtcataaccatttcctgatgaaaacacattaacaacgccatatcttctcgctatataatcaataaaaaatgatttatcattataatctattggataactctcagccgaaccataactatgatttattattctaacgttattatctaaaactaaccattctagagatctttgtcaagtagaatttttagaagtaaaatatgagtaaaaaacttgcgcttttttacctattcctttatttcctccaattatactagatactaataagccatgatcatctattgataactcttttgatgtatcaaaaattttaggtttcttgaaaaaagtatgaaaattattaatagtaccataataatattctaaaactcctacattagatattttagaattattttcaacttcttgttgtttctttttagtaaagtttatatctgtaaaaatagattgattatctatttgtgttctttcaaaatattcttctttttttattgttttatcagtagtttcaactttagtttcagaattataattacccctcaataatgcgcttacggaatgtaattctcctgtttcaacacacttaccaggatataaatcgcagtttaattcagaacctatgtattgaggatatcaatttgataccatagcatttttcttataaaaaacaattcttgaaacataatctagtttgtcaattgttttgacaaaatttgaagcttgttcaacattatcgaaataaaatcaagctattggtaacattttacttgtttcaacttttcaatttatattgctatttttaaattcatatttgattttatttacaagagtattaattctttgttccaaatttcccgtttctctataaatatctaaataaatttttaattcaatagatttatttgcttcatttatatattgttttaaatcttcatctattgtatttttaactgaaaaatttcagttattaattgcaaatttttcacttgaaaaatttaatgatgcaaactcttcgttattgtttttaaattgcttgattatgctagttgaactagcgaataaataaaaaactggtgaaacaaaaattccagcagttatgaataattttagaaatttctttaattttttcattttaccttcctatcttatattttttctataatttaaattttaatttttgtattatatcataaaaactattaataataaaagtttaattttttggctcattattttaaaacttaactaaatttttaaaagaaaattactatgttgaaaatttaaaaatccttcttttttgaaggatttttatcttttatttactaatatctttaacaatatcagctatatcataagaaggaaataaactaatattttgatcttttggtatggcaaatattacaatgttttcacccacatgacctatagaattgttttccacaagcattactatatttccattatttttgattcagtctattatgtaaagtttctttaaattgtctacagatttaaaaaatggtaatactgaataaaatgaagtaaaataatcaaatttaggttcagttaagtcaagttgattataaaatttcaaaatataaatattattttttaatataacatcctttattttttcattaggaaaactatcagtaatatatttatttaaagtaggaagtattctggatttatctaatttgtttacatcctgtaaatctttaatttttattatgttatcataatcacttcgcggagccaaaattgtttgtttttcttcttcattttttaaaaactctttttcttctggtgatatttgtcctttttcaaaaatataattactataataagacagtcaataaaatttaattttaaacttttgtaaataaggatttcataatcttgtatagtcacctaaaaaaagtgaatcaaataatttaattttttcttcaattgtttctttatttttaaacttttgtaaatctttagaaaagttgttttctaaattattttcagtatttgaagaagtatttgtattttctatagttgaatgctgagagtttagattatttgaagaatttttattatttttgttctcatctgtttttttgataaaactagtactattagttttattacaagatatcaaaaaagaagcaataggaaaaagtaaaaaaataattcaaagagtttttttcaattttattgtcatattaaaattctattatgaattccttttcattgtataagtaattgctccaatgtcttttactgaattttcaaatattgtacttgattttatttataaaaattataaaagtatttgagttagtaattttaaatcttgatattttctttatttttttataaaaattaatctttttatgcttattgttttaaatttattattttacaaatagtacattaatattttttttaatttcaaaattgcatttttttataattaaaatcagttttttaaatactaacccactatttataaaaaattttcttataaaaaaagttttaaattttgtaaattatattacttaaaaaataattgttttttatcaatacaataatttatgatttgtaattataataatcaaaaattagagtatatttccctcactatagtttcaggttttgtagtttcagaaaaatgtatttcttcttcttttataaaggcaactatactaatttgagccccaaaataaggtaaagaatcattgtgataacgaataaaataatcaggatcaataaagtatagttttttagatattaaaccatcaaaaactcatcagcccatttgatttttattaatgtattgcaaagtcgggttgtaatttttaatagaataataaatattgtatttttccaaaatctgttcagtagtttcagaaggaaaaaatttactaaaatattttttaaatactggaactaaaatttcagaatctaattcttcgaaatctttcattgattttaaaatattattatttttatcaattttatccataaaattgttaaatattgttctatttttttccatttgctttttgagttcaaaatctctaggaacttgattcttgggtcaaacaggattatttggattacgtcctaattcatcagtacttagaagagtatcttgtgatactcagtaagaattcataaaatattttgattgataagtagaaaaatttttttcaatctttttaagattcttatcaaaaaaatttacttgttctgtttgtgaataacttttatatttgtatatcattttgtaagtaaatcaaccaaataaagaaacatttaatgttatacacaaaccaagcaataaaatttttactttccttctcattttaaagttctttctaaaattaattttttacttaaaataattaaaaaaacaaaataaagatgaaaattaataaatttttatatcatttttattaaatatatccctcttttttgtttttattttataagtttttaattaaatgtatttttagtcattatatatctttttttattgtttcaaaattattttgtaatttcccaaatttcttaatttataaaattaaaaaaatattcatttgacacatctttattccacattttaaaagaaaaataaactaaaattaaatcattttttgtactcgttaataaaaataattttaaataatattattgcttttatttttaaagcatcattagttgcttacaaatttgttgtgtaaaatatttataaaaatgtaatttatttattcaaaaactttaaaaaatttttattttgcatatgtttataaataaaaattaaatacatatattaagtggaattgcaacatttttgacttgtttaatttttattatttttttaacttttacatcaacataatttttttattttcaatatttttgaacaaaacttttaaaacctttaatttgtgatttgttattctaggtttataatttttgtttttaatttattaatttataattaaataactttataaaacaatatttatatatatttcatacatttaataagatattttcattaactacaggaattttatgaaagcaatacaaaagtttttttccacttcttcagaaatgagattcgctcaaagattattaaaaaaaattaatgatttaactggcaaatattctaatatgtcagatagcgaattgatgaatcaaacatacgaattcaaaaaacgtttatctgcaggtgagactttagctgacattagagtagaagcttttgctgtagccagagaagctacaaaaagagttttgggtaaaaaaccttatgatgtacaaatcttaggtggtttaattttagactttggatctgtagctgaaatgaagacaggtgaaggaaaaactattgcttcaattgcacctgtttacttaaatgcattagcaggtgaaggagttattgtttctacagttaatgaatatttaacagaacgtgatgcccatgaaacaggtcaagtttataattttttaggtctttcagttggtattaataaagtaggtttagataacgaaaccaaaagattaatgtattcagctgatattacttattctgttcactcagaactaggttttgattatctaagagataatatggtcttctcaaaagaagaaaaagtgcaaagaagccttaatttttgcttaatcgatgagattgattcaattttgattgatgaagcaaaaactccattaattatttcaggtggacaaaatcataattcttcaatttatttagctgcaaatcagtttgtaaatactttaaaagacgaagatttttacattgatttagaaactaaaggaattaaactaaacgatcaaggaattgacaaagcaaataagttttttaaggtaagaaatttatacgaaattgacaattcagaactagttcatagagtacaaaatgctttacgtgcttgcaaagttatgaagcgtgatgttgaatacattgttagagatggaaaaattgagttagttgatccatttacaggtcgtgtgatgcaaggaagatcttattctgaagggcttcaacaagcgctacaggctaaagaaaatttagaaattgagcctgaaacacaaacattagctactattacttatcaaaacttttttagattgtttaaaaagctttgtggtatgacaggaactgctaaaactgaagagcaagaatttattgatgtttacaatatgcgtgtaaatgtaattcctacaaacaaaccaattagaagaaaagatgatacagacttgatttttgcttcattaagagctaaaaataaagcaattattaatgaaattaaaaaaattcatgcaacaggacaacccattttagttggtacttcacaagttaatgaatctgaaacactttctgccttgttagataaagaaaatttatatcatacagttttaaacgctaagcaaaatgaacaagaagccgaaattatttcacaagctggtcaaaaaggggctattacaatagctactaatatggcaggacgtggaacagatattaaacttggtgaaggagttttagaactcggcggattgtatattttaggaacagataaagcagaagctagaagaattgacaatcaattaagagggcgttctgggcgtcaaggagatattggttattcaagattttttatttcaattgaagatcctttattacaaagattttctaattttcagcacattcaaaatgcttatagtgaacaaggtgatgaagctataaaaggaaagacaattcatagcattttgcttcgtgcacagaagaaaattgaaggatttaatttcgatactcgtaagtcagttttaagttacgatgatgttattagacaagaaagagatttaatttatacacaaagagatattcttctagaatcaacaaattttgatcattatattcaaagaatgatttctagaaccgttgatttaattttgggctatgattttataattaaatccaataaagaagtaaattatactaatttagtagcttttttaaatgataacttatcaagaataacacattatgattttgcagagttaaatttagaaaaatatcattacgaagatttaaaagaagttcttgaaaaagctttaaacaaaatatattttgaaactattcaatatcaattaaaacaaaatttatcagataattattttgctgaagaaagacacattattttatctgctttggatacaaagtgaaaagggcacattgatacaattgataaattacgttcatctgctaatttagttcagtattcacaaaaaaatccttatcaaattttcactgaagaagcaactaaaaagtttgaaattttaataaatgaaagtgcatatcaagcagttttatctttatttaacaacgcaaatgctagaaaaaacgaaacagtggattaccaactttcaaatggtcaaattattagctttaacgcagatacccctgctgaaatagtacaacaagtaattcaacaaaatgaagcttatattcaacaattaaaccttgaatatgaacaaaaacaacaacgtttaaatctgctttatgaagaaactcaacaaattctttctactgtaaaagaaaaccctgaagatcaagaatttgaaatttacacccttaaaaatggtgatactttaaatatcaataaaaatttagattttgattataaacaacaaatgattatagaagctgttttcaaattacaagaaaaagaagaattagagaaacaaattcaagaaaataatgaaaatagcaaggaaaatgaagaactttcaatagattcattagtttcagaatcaccatctaattcttcagaagaattaccaataaattcaacaacactagaagatactcaagaagaaaaagaagaatcacctgaagataaaagagaagaagaaattgaagataaagttcaagaaaaagaagaaaatccagaaaatgctgaattataaaaagctataaaaatgaagaaaatttttcaccaattgttttttattatttcaatcttatttctaattgcttccttagtagaatcgatgtacttttactttggattatcgcaaaaaaatattacgaatttaatatttaaactttctttaactttagttactatttgcttcaattttcttccttttttcttcttttgacggtttaaattaggaataaaaaattcatttttagctgatagaagatttcataaagatttttgtaaagcaaaatttttaaaagaaataaaaatatgatggtattttttattaataatctgggttttaataagttcatatttaacttacttgtatttttcaacaaacacaaagttttttagtattttttacatttggtacttcttttttcttcttttatttttatttttctgagaaaaatcattttgttttcgtgttaaacagcaacaaaattctgaatgaaaataacaaagttataattctagagctgtttcttaataattttttttgaatttgtgctaatatataaaattattaatttttaatattaataaattaaattttaaacataaaaacaatgaaggaagatatgacaccacatataagtgctgaaaaagaaaaaatagctaaaatagttttaatgccaggagatccattaagagcaaaatttatagctgaaaattatttagaagatgctgaattagtttcatcagtgagaaatgtattcatttacacaggtttttataaagaaaaacaaattactgtagcagcttcaggaatgggtacaggttcaattggaatctatgcttatgaattatttaaattttatgatgttgagaaaataataagaattggttctgcaggaagttatagagaagatttaaaagtacatgatattttaattgcagaagaagcaatttctgatacttgttcttttgctaaattaatgttaggtaagaaaaaacatgtaattcaatctaataaagatttagttgctgatttactatcaattgctaacaaaaaaggagttaatgtttctttagaaagagtacattcaactgacgctttttattcacaaagaccacttgaaactacaattaaacttacagaagcttctgctgttgaaatggaatcttttgcactttttgttgttgcaaaattattaaaaaaacaagcagctagtttattaacaatttcagataatttaatcactaaagaagaattaaatccattagaaagacaaaatggatttacaaaaatgatggaaatagctttagaaataaagtaaaatcgtgaatattttagaaataataaataaaaaagtacataacaaaaaaatcagccaacaagagtttgattttgctataaattcctacatttctggtcaaataaaagattatcaaatgtcttcttttttgatgtctattctcttgaatggcttagataaaaaagaaacttattttttaacaaaatcgtttgtagaatctggagaagtacttgacttatcaagtataaaaggaccaaaagttgataaacactcaactggtggagttggtgataaagtaactttaattattggtccaattctagcagccttaaatattaatgtagcaaaaatgagtggaaaaggtctaggtcacacaggtggaacaattgacaaattagaatctattccaggatttaatacagttttatctgacaaacaatttattaatcagattcaaaaaacacatttaagtattattggtcaaagcaaaaacttagtaccagctgataaacaaatttatgctcttcgtgatgttacaggaactgttgattcaattcaactaatagcttcatctataatgtcaaaaaaaattgcaacaggagcagacgccatattaatagatgttaaatgtggaaacggcgcttttacgaaagatttaaaaagtgcaagagcattagcaacagaattaatagaggtaggaagaaaatttaagaaaaatgtacacattcatataacaaatatgtcttcgccattaggtaagatgattggaaataaaaatgaagtacttgaagctataaaaaccttgaatttagaaggtccaaaagacttggaagaaattagtgttttatcttgtgtagaattgatgatgcttgttaataaaaagcttactgaaaaagaagcaagagaaaaagtttatgaagttttaagaagcaaaaaagctcttgaaaaattttatgagttagttcaaaatcaaggcggtgacgtaaatcttttaaaatcaactaaattctgacagccaaaatacaagttagaaattaaagcagaacaagaaggttttctagaaacaacatcagctctaatctttggtcaagttgctgttttattaggtgctggacgtcaatttaaagaacaagctttagactatgaagcaggaatagaacttaaaaaacaaaataatgattttgtaaagaaaaatgaagtactttttgttctttattcatctaatcctattgatgaacaacttaaagatgaattacaaaaagcttatgttattagacaaaaaccaaaaaaacaaaaactcattttagaaagacttggataatgattgattataaaaaaatgattgaccacactttattaaaaccagaagctacttctaaagacataataaaacttatttctcaagctaaggaatatggatttagaggtgtttgtataaattctagttgagtaaaattagctaaagaaaaacttgcaaattctgatttagacataatttcagtagttggctttcctttaggagcttgcaatacacaaacaaaggtttttgaagcaaaattagcagttgagcacggagctactgaaatcgatgtggttataaatgtaggaaaatttaaagaaaaagtttatgactatgttttaaatgaaattcaacaagttaaaaaagctattggaaataaagttttaaaagtaattattgaaacagcacttttaactaaagaagaaataaaaaaagcagctgaattggttatgattgcaaaagctgactttgtaaaaacttcaacaggtttttcctatagaggagccactgcagatgatattgaacttattaaagaagtagtaggtgacaaagttcagattaaggcagcaggcggaataaaatctatttccgatttagaaaattactataaattaggagctactagatttggtacttcttcatctttaacaatattttcacttacttcagaaaaagaaaaaataatttattaggatttttttaattttcttttataattcaaaaaatttgcaaaaaatcagaaaatttatactaaaagaaaaggaaaaattaaaaaaatgttaaaaattctaactcatccaattattgaaactaaattaacaaaaatgcgtgatcaaaacacaccacatcacatttttagaatgttattagaagaaatttcttcattaatggtttatgaaattttaagagattacaaaacaaaaccattacatgttaaaactccaacaaacagcattcaccacggacaacaattagatgaaaaaattgttttagttcctattttaagagctggacttggaatgttacaaggaattttatccttagtaccaacagcacacgttggacatataggactttatagagaagaaactacttttgaaattaaaagctattattttaaacttccaacagtagaaaagtcttcaaaaatcttcattttagatcctatgttagcaacaggaaattcaactattaaagcaattgactttgttaaacaagaaggatttactgatattactttagttaatttagtagcagctccagaaggaataaaagcagtagaagcaaaacacccagatgttaatatctacgtagctgcagttgattctcacttaaatgagaaaaaatacattgttccaggtttaggagatgcaggagatagaatttttggcacaaaataaaatcaaaaatgaaatgatcttctagatttcacaaatccactgtttttaatataacagtttccggtgtgtttttagcactttctcttattttctttgtgttatcgcaccaaaaattttttacttgaccagtagttagtagtataggtcttaaagtcgatttatcgactttatttattcttccgatttttgtaattgcaaatactttatgtggtgtagccgttctcgtaataaggtttgttttaggtccttttattgttccttcagcaagcttagatattgattattttggtaattttatcttacttttttctagcgccatttttatttttctttttttattattaaataaatttatcttcaaaaacgaaggaaaacaaagcatttctacggaaagtcaatgttcaaattctaagaaaaaattatataaaaatttgtttctaaatttgctatgttctactattgttacttcattattactaacaattttaaatgctttattttttactcctgtattttttaaattatataaattaacaaataacatttcacctattgatttagcaaaaaaatgaaacacagataaagtattaaaaactttttctttgtctctaaattattttctttgagcatttgttttatattttccttttaacttggtaaactttacagttacttcaattttgttttttggaatgtacactgtaatagtaaaaaatcactcaaaactgaaaaaaaacttcaaatattaacaaattttggcactttttagtgtttagtgctattttttggtaaaattataaacattaatgcaaaaaacttcaaaaaggaacaaaatgacaactaaagctaaaaaaacaacaaatcaaaaattcaaatttatagtggaagaaaataaaattttctttccaagaatttctgatgcaactgcaaattttccacaagaaaatggtttaccttttattcattccaaacttatatcgaacccaaaaactctagagattttagaatcaataagaagagaatcaccagatggaacactaaaaggaacaaagttagtaattgtttatactacaccagcacaaccatcggttattagttctattgatgatatattaaaatatgcatcattagtaaaagtagttaacgacaatgttagctatttagtagaagaaaataataaagaaaaagctgtttctacaaaattagagtttgaggtattagaaaaagtaaatgttattagtcttgaaaaagatacagaaggtattcattttgttgatgctgtagttaaacctactaaagaaacaatttcaccagaagctttagaagtatcacaaataacaaaatttttaaactttttaaaagatgaacgtttaaaagtgagacttagtttattttctaataaagtttcttcagattttgaagttcaaaagttaatagatgaagaattgcaaacaccaaatcagattttaataaatgctataataggtgctgcaagtgatgaatcttttacttttttagaaagctataatatctttgaactaaataattacattgacaaaatgaaactaattatgaagtatagaagatatagaagattatttagagatattgataaagatattgatactctaatgaaatcaaatcttgataaacaacaaacagagtttatattaagagaaaaaataaaaactatacgtcaaaagttaggtgatgatcaacaatatgataatcaacttttacaaatcttaaaaacagataaagcaaaagctaagtttccaaaagaagtaatttctacacttataaatgaatcaagaagaatcaaaggaatgatgacaacttctccagagtcaaatatttctaaaacttacattgatacaataatggctttaccttgaagacaagtatcactagatcacttgaatttagaagatgcaaaaacagcattatctaaaaaacactatggtttaaatgaagtaaaagatagaattattgagtatctagcaaccttaatcaacagaaaacaaaaatttgaaaaagacaaagattcaaacaacttatccttcattgagaacaattttgctatagattccaatcttttttctagcaaaaaaacacaagagctaaataattattctaatatgccaattttaactcttgtaggtcctccaggtacaggaaaaacttcaatagcaaaatctatagcagaagctattggtaaaaaatttgtcaaaatttctcttggtggtttaagagatgagtcagaaattcgtggacacagaagaacttatgtaggagcattgccaggtaaaattattcaagctattaaaaaagccggagtttctaatccattaattttacttgatgaaatagacaaaatgagttcagactttaaaggagatccagcttctgctatgcttgaggttctcgatcctgaacaaaacaaatatttccaagatcactatttagaaatggaatatgatctttctcaagttatgtttgtagctactgctaactacataaacgatattccagaagctttaatagaccgtgtagaaattcttgaactaagttcatatacatttttagaaaaaatcgaaattgcaaaacaccatttattaccacaagtaatttctgaaaatttattagataaaagacactttaaaatcaacaataaaacaatagaattcattataagacactatactttagaatctggtgtaagacaacttaaaagagtttttgaaaaactagcaagaaaaataattatgcttcttttagataaaaaaatagaagaaaatgaagactttctagttgatgaagaacaagttttaaagctattaggaagaattaaatatactcaagaagaaaaagaaaatacttcacatataggttcagttactggacttgcttatacttcagttggtggttctactttacaaattgaagtaacttgtgttccaggaaaaggtgatattaaattaactggtcgtttaaaagatgtaatgcaagaatctgcacaaatcgcattaacttatgttagatcaaatgctgataaattcggaatagattttgactttgataataaccaaattcacatccacgttccagaaggagcagtaccaaaagatggaccttcagcaggtattacttttgcaactgcaataatttctgcacttacaaaaaaacgtgttagttcaaaagtggctatgacaggagaaattactttaagaggaaaagttcttgaaattggtggtttaaaagaaaaatctttaggagcatataaaaaaggaattaaaaccatttatattccaaaacacaacgaaaaaaatctggttgatattccagaagaagtaaaaaaacaaattcgttttgttcctgtagaaaaatatgatcaaatttatcaagaattgttcgaaacaaagtaagtttataaatatttttttgtttatcaagacttacaaaatacttgaaaaaaagtaaaaatttggtaaaattactttacttaatttttgctattaagcaattttataacgtgtgtggatgggaaatagttgaaaggctattcataggtggttttaaacgcgtttagaattttttaaaataaattaaattaacactgaaaggaaaaatcatggcagtacaaaaaccaggtgcaaaaaaagattttgaccgtagtaaagaacatattaatattggaaccattggacacgttgaccatggaaaaacaacattaacagctgcaatttcaacagttttatctaaaaaaggattagcagaagctaaagactatgcttcaatcgatgctgctccagaagaaaaagctagaggtattacaattaacacagctcacatcgaatatagtacagacaaaagacactatgctcacgttgactgtccaggacacgctgactacattaaaaatatgattacaggtgcagctcaaatggacggtgctatcttagtagtagctgcaacagatggaccaatgcctcaaacaagagaacacatcttattatcaaaacaagttggtgttccaaaaatcgttgttttcttaaataaagtagatatgctacaaggtgaagacgaaatggttgacttagtagaagttgaagttagagaattattaagttcatatgactttgacggagataatactccaatcattcgtggatcagctaaaggtgctttagaaggaaaaccagaatgagaagcaaaaattcttgaattaatggatgcagttgataactacatcgactcaccagttagagaattagaaaaaccattcttaatggcagttgaagacgttttcacaattacaggtagaggaactgttgctacaggtaaagttgaaagaggacaagttaaattaaacgaagaagtggaaatagttggatataaagcagaacctaaaaaaactgttgttacaggaattgaaatgttcaacaaaaacttacaatcagcaatggcaggagataatgccggagttcttttaagaggagttaacagagacgaaatcgaaagaggacaagttattgcaaaacctaaaactattgttccacatacaacatttaaagctgcaatttatgttcttaaaaaagaagaaggtggacgtcacacaccattcttccctaactataaacctcaattctactttagaacaactgacgttaccggaggagtaaaattcgaagacggtgttgaaatggttaaaccaggtgacaatgtaaacttaactgtagaattaatagctccaatcgctgttgaacaaggaaccaagttctcaatccgtgaaggtggaagaactgtaggtgctggaacagttactgaaattattaaataattcaatattcaataatgaaaaacactgaatttcttcagtgtttttttatgctcaaatgcctaaatagtacagcgaaaacaatgtttttaatttaatgtgtcaattttatattctaaaaatagctcattaaatatcacagcaaataattttattactttttatattttttcaaaacataaataaaatgattttataaaaaacttccgaaacaaaaaaaaaaaaaagtgttcaagaatgaagacacaacgtgatttccacttttaaaattaagttgctaattaatcgatttcttagtcaaatttaagacaaaatgagaaaaaaatgaaaaagtataaaatcttattaacttcaataggactaatatttttgcctgccatcacttttttaagttgtgcttatagtcctgttctaagtaatcgaaaaataaatattaacaatcaaacaagttctgcacctgttgtaagcaatcctgtagatgatccaaataataaaactacttcaactaatccagttcaagttggacaagaaacacaaactggtcaaactacacaaacaacaccagttactacaaaaaataaacccgaagctgatactcattctcaaattgttccaactaaagaagaatttgaagctaagtttaataaactagaagaaaaatgaagcaaaataaaggatttacaactaaaagcaagtgcagatcctttagttaagtccgccatcgaatattgaattccaaaagtaaaaaataatttaagccaagctaaaatcaatgaagttttagtacaaacaggaattgatgttcttgtgtttaaattaaaggaatttgaagactcaatcgataaaactgatcctatttcagaaactaaaaatccagattcagttggttcaaaaccagttgttgtagaagatttaaaagaaaaaagaagcaaaatcaagcaagaattgtataaaaacatgcttgaaggtcagtattacaacattaaaaaattatcttcttctaccccacttgcatctaaagaatttggttattattcctatgtaaatcctgcacttaaaaaagttaataatggtgatcttttattaagtgtagatggaagaaaatttaacgataaagatacaaacaacagaatagatcaagttcttatttcttcaaaagatgaaggaaacacatgagataatgatattaatcaaattgtctcagtaggtggtggcgatgctaatgtaggagttgcaaattcaggttcttttgtggaagtctccaatccaaaaaatccttcagaaaagaagctaatttacattttcaacatctgattacctgattttaattacagctgatataaaacacgtcgtggtgagtttgtaaacgataatataaactgaagacagttttatattttcgaaaataaagatgaatgaacaaaatataaaaacggaacaactggtgctaacgacactaaatacatagctaaacctattttatttaatggtaaacctaactgatgaaaaatatataaagtcaaaacccatacagcctttaaaaacatagatattaacactgatttagaagatatcaatacatatttagataataattacgatcctgtaagcaaaagaataacaggaaatgtatatgaagaagtaccagctagacaaattaaattaaaaggcaaatcctttagtaatttcttaaaagatagcccttgaatagacgaaatttgaagttatgatagcgaagaacctctttccaattatctttcaggctcaatttatgatacagagcaaaacagagaagattgggataaaattacagactcaaaaactagaaaagaagtttttgacaaagccaaaatttttgcactcgatgctacttcaaaactttactctttagaatcttatgacaatggaaaaacttgatctaatttaactgacttagattttcaactttctttagaagatggtcaaaagcaaggacattattttggtggtttaatttcaggttctggtaatggggttcaattaacaaaccaaaatccagctgagaaaaaagcaaacggaagaatactatttcctgtttattgatgaacctgaagtgatccaactactaatacacatgaacaaaaacaagcagctatttgaatttattcagatgatcaaggacaaacctgacatagacttgctaaagacccaaccaaagaaagtacttttgaatctagcattgttgaagacgaaaaaggaagaatattcataaacaagaaaaacgcaaccactcatccaagtgtgacatatgtttcaaatataacttcccaaacaccacaaacatttaatttacctgttgataacaacaatgtcttttcatcaaaaaataatttaggttttgctgtgtttaattgagataacgacatttattatctaattacagcacctaaaacaaatactacaaatggaacaattttcctttataaaggaacagatttaactcatccaattaaagcatttgaaattacagatgcaacaactggatttgccaattcatctttagaaattacattccgtcaaggaaattatctcgaatttgcagtagcttatgaaacatatgaagatattaaaaaactaaatttatcttctggaaaaagcattaaagttgacaaatttgcaatggttataaaataaaggaaacaagcatatgaaatttacaaaaacaaaaaaattatttattactttaacaacttttatagttcctactgcttttttagtatcttgtgcttattcacctgttttaagtaatcgtaaaattatgccttcagacaatgtttcaactccacctttaatttctaatccgccatcacaaccaactcatcctgagcaaactaagccaaataatcccttagttccaaatactccaccagctaataataatccagaaaaaccagaagaaaatccttcaaaaatgaaggaaaatgatgcaaaaccagaagttaaaacccctgttgttgctccttctaatttaagtctaaaagtagatttaaaagctttagaaaaacaaagacaagataatgaacaagaacttaaatccacaattagtgattatttaagctacaatattaaacaaatttcttcttctattccattaaaaagctttaccgaacaagttcattcatttaatattcctgcaattaaaaaactcccaaatgagctactaattattaactcagatgctagagaatataattgaaatgatagttttaatataacaaaacaagttagcaaaatttctgctgatgagggtaaaacttgatctgatttacaaacaatagtcaaagtaggaggaggaaaacacaactcaggaattgcagttgatggttcatttataactgtagaagacgcaaaagatccttcaaaaaacaagctaatgtttatttttgatattactcaacctgatttttcactatttaattgatataaaaaaccacataatgaaatagtaaattctcaactacgcaattgaagaagattttacatatttaattccacaacagatactacaaattatgcaaatggaacttatacaagtgcaaatgataattacttagctaaaccaattattttcaatggacaaactaactgatgaaaaatttataaattgccttttaacgttgactattcacaagtaaaagaaacttcaaatttgattgatacaaaaatttatgtagataataactacaattctcaaacaagaacgataacaggtaatgtttataaaaatttagaagcaaaatcaagcactttagataaaaatacttacacttttgatcaagacttaaaaccttatttagatggttcaatttatgattttgctgatataagagccgatgtatcaaatcaaaaacttaaaaaatatgcttttgatggaggattacaactttactctttagaatcctatgataacggacaaacttgaacaaatctaaacgacattaatatgagtgttaaaaatgacgacggcacaaatcaagctagatactatggaggtttattagctggtgtaggtaatggaatccaactaaaacaccaacaaggagaaaatgcagaactaaacggagcactatttttcccagtttattgatttatcaacagaaatccaagcacaagtggtgaaaatagattagtacaacaacaaacctttattttctcaaaagatttaggcaaaacttgacatcttcatgatgaaaaagcgaacttaaattctgatacaaacacagaagctacaataaatgaagatgaaaaaggaaacatctttactaatcaaagaaatctaactaattatcctaaagttatggtttcaaacgatggactaaaaacacaaactcaggtagcagtaaaaaaagaaacttcacaatcttacaatacttatgttgcacaaggatttttaaaaattagtgccaataataaagattactttttaatttcagcaccacaaggtccaggtagaattggtggaaaaattttcttatatcaaaatgattttacaaacaaacaaacaatttttgaagctacagcacctcaaaaaccctttttatactcagcattagagctactttatcaaaaagataattacattgaatttgctttaacttatgttacaaatgatgataaatcaacgatagcaaatttaactgatggattttccattcacgtggaaagatatggtttatatttaagagatccagagaaatttaattaatatatgtaatttacatacaaaaaacactgaaaaatttcagtgtttttgttattttattttacaattttgctatgaaattattagtaatagctttagaaaatttccaggatttagaattagtgggttttttagcaacagttaaaagagcaaaaatatttgaaaaaataagttatttaaatttagaccaaacaacagcattaggacagtttgaaatagtaaaattagcaacaaaaaagaagctaaattatgaaaactatgatgcaatttatattccaggtggcagagcagcacaacaattacgaaaagattcaaaaactctagaaataattaaatattttttagaaaacaaaaaatgagtctttgcgatttgtgatgcaccaaatgctatgtatgaaacaggattaattaatggctataaatttgtaggttatccaattgcaaatcaacaaaaacctaaagatttttttgtaaataaacccgttgttgtttctaaaaacttaataactgccaagtcagcagaatatgcagttaagttaggactaaaagcagtagagaaattaactaacaaagaattagctcaaattgtatgaaaagctcattcaggaaattagggtcaataattatataacacttttaattttttattcatttttaagatattttttaaaactttttaaagcaaaaacaaaaaaaaaaaaaaagtgttggaaaatgtgggaaaatatactttttcaataataaaaaaaataataataatgttcattttaaaaatcgtagtttaaaatgaaagtatttatataacaaataaataaaaaaactgaaagaaaaaatatgacaaaatccaagaaatatttagcaatctttggtttggcatttacaccattaatagttctaatgagttgtggtcattcaccagttttaagtcaaagaggtgattcggcaaaccaaggaggcatgacaaattctcctgataatggagcaggttctggttcaggagcagaatctaatccaggaacaggcggcggaaattcaggttctggtacaacttcaggtacagaaggaactacttcaggaactggagctacttcaggaacaacttcttccaatcaagacagtagtctaacaccttctgttttatcagattctctaaaagaaaaagcaaaaataaaagaagaattatttaaaaatattgaaggtaataaattttttaatatcaaaaaactttcaagttctacacctttagttgcaagaaattttggagctaattcttttgaaagaggagtagttaaaaaattaagtgatggaagtctaattttaactgctgatgcacaagctttaacttctggtcaaagagctcaaatttccagaggacttattaacaaaactaaaacagttttgatgagatctaaagacgatggtaaaacttgagaaacagtttctccagaaactatagttcaagtaggtggtggaaatacaaattttggaatcgcaaatagaggttcatttattgaaattcaaagaccacttaacgaaactgatgatcaaaatgaagcaaaagaaacaaaagatttatcaaacaacaaattaatttacatttttcaaatttcacaaccagattttaacaacgcggtgtttttacataaacattctcaatttgtaaacgaagggttaaattgaagaagattttatatttttaataaatttagtgactgatcagattattattctaaagcagacacttcaaatgcggaaaaatatgtagcaaaaccagttgtgtttaatggtcaaactaattgatgaaaagtttataaaataattgataacactgcttataactgagttaaagatgattcatacgaatatgttccagttgatagtggttctgatgaatttaaattaaaaatagatgaaggaacaaaattagaagacttaaatctttttattgataataactacaacccaataacaagaacaataacaggcaatgtttatgatttctcatctttagtagattctgatacagctccaaaaatgcttgattttgcacaaagagatagagcagcaacagaacaacttcaacaagattttccaggaattactgagttttatagttttgaagattccgctaatttagattcttatttaagtggttcaatttatgatattccacaagcaagagaagactttggacaagctaaagtaggaaatcaaacaataacaagaccttcaaaatactacgcatttgatcaaagtactcagttgtattctcttgaatcttttgataacggaaaaacttgatctaatttaaaagatttaagttcacaattaaatttatatgattttacaaatcaaaatgactatggattaatttatccaggtggagctaatggaattgaactaaaaaatcagtttgatagtagttataatggaagattgatttttcctgtttatttatgaagactaaaaccttcaggaaatccaaaagatgttcatcggtcaaatgaagctatttgaatttattcagatgatgatggaaacacttgacaaagattaattaaaaatccagaagatacaaaaacaactaatacaagtttttctacaattgtggaatcttctgatgggtatttatatcaaaataaatcacgtggaagtggaataccaaaagttgatgtagctacaacagcatcagatgttgatgaatcacaagagtattattacacaataaataatgcagaaaatgcaaaagattctccatttactgaattaaaatcaacaagaaatcatcaaacaaattttgctcaaggatttacagtatttaaatgaaataatcaaacatattacttaatgactgcaccaaaatcagataacaaaaatgggcaaattattttatacaaaggaagtgatttaaaagagccaatgaaaatttttgatatcacagattcaaatactccatttttaaattcacaattagaaattacctttagaaaaggtaattatcttgagtttgtagtgacttatgaaacaagagataaatttgatgaatttggaaacaacaaaggtacttcaattaacgtagataaatttgcgttggtgctaaaataggaaggaaaaagaagaaaaatgaaaacaaataaagcaaaatttttaattacttcattagctcttgtagctccagttttagcaatagtaagttgtgcttattcaccagtttatagctatagaaatcaaggctcaaccgacgcagtagatccagtgactccaaatccaacaaatccaacaaatccaacaaatccttcaaatccaactactccttcaaatccatcaacacctggaaatccttcagatactgtaggtaatccaaatcctaatgatccaactcttgaaactcaaaatatacaacaacctatttcaattgaacaagaaagacaaaatgcacaatctgatttaaaaaacttcatttcagatgataaagaatgaaatcttgaaagactatcaataacaaaaccattagaaaacttaagttttggtaattattcatatacaaatccttctttattaaaactttccgatggaacttgattcttagcatcagaaggaagaaaatacagtgatgaagacagcaataatacaattcaaattgtttcttcattctcaacagaccaaggaagaacttgatcagagaaggtgagtccaattgttacagttggaggtggtaaagctcatggtggaattgcaaaaaatccttcatttgctgaagtaaaagacgcacaaaatcctgctaacaacaaaataattatgttatttaatataagccaacctgattttgatccagttgcttgatataaaaaaccacatgctgaatttgtaaatctaacattaaaaaattgaagaagattttatattctagattctaaagataaagctgacaaatatctaaacggaacatttactccaacagatgaaaaatatttagcaaaaccaattgtgtttaatggtgaacaaaattgatgaaaagtttataaattaccacaaaataaatcttttgatgaaatcacagcagattctgaattaactgacacaaaaatttatatcgacaacagttataatcctcaaactagaacaataactggtaatgtatataaagatgttgaagcaacagcagtagaaggtaaggataacgaatttacttttgcaaaattagaagtattaccaacaaaacttgatggttcaatctatgattacaaagtatctaaaacagaaaacaatcaaaaatacagtgttaataagtacgtttttgatgcaggaattaaactctatactttagaatccaaagacaatggtaaaacttgatcaaatcttcaagatatcaattctcaactaaatactttctatcaacccaaagaaaacacacaagataaatcagcaagatatttaggaggtttatttgcaggttcaggtaatggagttttcttaactaatcaaaaacctccagcagattcagcaaatgctcctatgttaaaaaacaatactttagttttcccagtttattgatttgctgaatctaatccagaagataaaacagaagcttcaaacacagagagtttatttatttattcaaatgattttggtaaaacttgaaacagaagtagtacaaatcctgaatttacacaagcacaacaaactaacacaactaagtcaacaataattgaagacaaagaaggaaaaatatttattagtcaaaataatacttctggatttttaaaagtaaaagcttctactgattcaggaacaaccttcacaaatatagaaactacacaagatcaaaaattgaaattcccagtttcaaaaactttagcttttgcaaaaattagtgctaactcacaagattatttcatatatgctacaccagcaaatgcagatggaacaaatggtaaattatttatttctaaaactgatttaaaaaatagacaagaaatgctagataatttaaatggtgattattttggttattatttaactgatcacgatgttccatttgaaaatgcacatattgaaataaccttccaaaaagataattatattgaattcgcagttgtataccaatccaaagaaaacctaactaaatttaatccaaacttaaaagtaggttctgatatttatgtttcaagatatgctttatatctaaccgatatttcaaaactagatatttaattattaaattaaatagcttaaaaaacactgaaaattcagtgttttttacataaatatagagaatttgtttataattatttattaaaatttattataatttaaaaataataataaaaacactaaagtttattcatattcttttaagaaaagagatgttatgtacaaaaataagagacaagcaattttattgcttagttccatttttggtctaagcccaataatattaactgcatgtggtcaaacacagcaaaacaaccaaccttccgaacaggctcaaaaagagttgaaacaaaaagacaaattaatctctgatttacaattagaagttgaaaatattaaagttaagctacaaaatgcttcaaaatttaatctagattcttcttcgccacaaacacctattgtagattctaacaaaacactagaagagcaaattttacaacttaaacaacaattgaagttattagaagataaaaaagtaacagaattgcaaaattcacaaaaacaaattcacgatttaacaagcgaaaatgctaaaatcacaaagcaaattgaagataaattgacaaatttagctaaagataatcaaaattatgctaagcaaaatgtaaattttttaaatgcattaaaaaatgacagtctttacaaaaactttgatcaagttaattattctccaactttgtttaatgacagtaacaaatttattgatggtagtgaagaagcaatagcaaactcaaataaatatttactagaaaatagctttaatcaagaaaaatcaagagtaaaagaacttatttgacctattttagctcaagatattttagtaaattctaaatcaaacatcacagctgataatttcaaagataaaatacttcaaaaccaatctaaaattttactagctcttacatacattaataagtgatataacttcaacattggagattttaatttcaaaaaatttattttgtacgataatccaaatttacaaaaagataataagtcatttttagattttattattcaaataggttctaaacaaccagatgattatagcccacaaaatgttattaatttttatgaaaaaaatttaagacctgaaattgattctagcaaagatttttttagctttatagaagcaaaagtgaaagaaaaagaagcaaatacaacagttgatcattgatttaatgaacaaattaaaagctttttatatcaaccagaaaataaattaaatgtacaaaacaaagaagaaattaccacaaagacaacattgtgaaaaaaattaacttctgataaattcaaaacaaaatttggacatttaattccaacacttttaactgctagacaagaaaatagtggtttatttgtagttaatacaattggtgctgtagtttttggaaatcaaaaattctacgatcattctgacatgggagctgatagaatttctaataattcagaagcattaaaaaataaacttaaaaaatttggtgatagattagaaggattttttgagttaaattataacttagtttcaacaagcactaaaaatcaaatattaaataaattatttatttttgactcattatgagatggtaaaaatacttgatcaacacaagaaaatttactagataaaactaaagaagcttcatatgacttcttctcaactcttgattattgacaagaaactaaaaatgttgttagcacaagtgtttctacacaaaatactccaaacgaagatgatgtttttaaattaacagaatctagatttttaacagaaattggaattgaaactattataggtaaaatttcaaataaccttcaaaacatactttttgaaaatcacaagcctagaacagatgtaaaagaagaaatgttaaaatttgattttgcaaaatatctttttgattcaagatttttcttaggattaacttcaataagctcagattcagaacttggaaaattaagcaatcaatcacttgattattcagactttcaagacttacaagcaagatgaaaaaatgcaatgagtttaatttatactcttgaaaacattgaagctgaattaaaattaaatttaactaaaaacactgataaacataaaactcaatcttacgatactgaagaaaacaaagctaaactattcttaaaagtttctactgatcgaagttcacacaacaaattcgaaactataaaacaaaatgacatcaaattattaactaaagtagatgacttagtagataaagattatgtttcttcttgaggttatacaactaatgattctgacaataaatcttttgatttattcaatgcattttatggtacagcagataaaactgatggagttactggaccattttcaatgagaagaaatacttttgagttatttgcagaactaggttgagaaaatggaatactaccttacttaacagacaaattaaacaaaaaaaatgatgctgaagttataacttctatgtttagcaacaaatcttacaaaaacttaaaagactttaaaaaagctatgtataaacaagctaaagaaaaagaagcaaaattaaaagaagttgatgcaaaaggatttacatataaatacaaaacttacaaattaagtgcagaaaaaataaaagaaattttatctacagctcttgaatatgatctttcaatgtctaaaatagctaaaaatagttattctaatgtaagagattcttatttctatgtatacaaacgtcaaatttttagtagtttttatatagcaacaaatggatttaaaaattctatttataaagatgaataaatataacaaaaagaagtaaaattcaataaaaaaagagacataatgtctcttttttagtattttttcaaagataaatacagtgtaaaaatttaggaaaagtttctttaaaagttttttacttcctttatttttctagctttttggtttaattaaataaatacctaatcttaccgatccactaccatgtatctgtacatcgtttgtattttcgtttacaatttttaagttttcagaataaatagttttactaatttcatacttatctgatcttatagataaattagcttttggtctgtctccaaatgaataaataattaacaaataagtaccatcaggattttttcttaatgtcatttcatcttctcgcaatggattatcttttcaaatatataaaacatcttttggatcagctacatatttagtatccatatcacgaagagctatataatcttgtcttgctttaattagagtagcaaatttgttataactagaatttggattatttactatatcttctacaaatccttcgcccggagaagctttagaagaaattatttgatctacatctctgctgtcttggaaaaatactcttcttcttaaatcttttcagaaaaatgcttctcgaacatttgtatcaggtgattttttagcaccttgcattaaaatttcgtttccattatataaagtaggtaaacctccacgagataacaaggaaaacatagcatattcataagcagatctttctaaatcgctgagtttgtgaggtgttacagtaacaggaattttccactgagttttaaaattattaattcatctctctacatcatgattgtctaaaaaaggcattcattcatgttttatatcctgcgcagttaaagatttaattacattattttcttcgtttcaattaatagatacatctgtctgtaattttcatttagtaccatcaattactgaagaaagtccttgattttcttgtccccaatactgttttatttcctgttcagccggatctcttcatcattctccaaatagtaaagctctatctgaagctcgtgtaataccagcttcttttgcttctttgtaagtatcttcagttacttttcttcaacgactaaataacttagtggtttcagaatcagaaagtgttggttttttaggattatcagatttaaaatagtgttcaaaagcatcatatctaaatccatcaaccccttttttagctcagaatttatgcacattatcaagttcttttaatacttcttcattattcaaattcaaatcaggcattcctgatcaaaactgtgcaacccatcttagtctagaaggtgttggattttgtttaggatctaaagcattataaacacttttaaagtattgtctaacattatcttgtccttcagattttctttttactccatcaggctcatacatgtaataatatttttgatatttttcatctccagccaatgctttttggaatcaaggatgttcataagatgtatggtttaaaaccatatccataacaacttttattcctcttttatgtgcttcagtaataaaatcatcaaaagctttcatacctcctagctcaggagcaacatctgtataatcaattacatcataaccatgataagtagaagctggatgaacaggtgaaatatataatgtatcaatacctaaatttgaaaagtaatctagtttgtcttttagtcctataaaatcaccaattccatcattattaccatcagcaaatgaataaacagttaactggtacataacattagattttttagcttcattattaaaaggagctataaatttttcattttttgcttcattttcataggataatttatttaaattatgatctcttatatattcagcaaaataaggagcacttcaattttttaatttttttagcttaaataattgtttatattcagcagattgtttttgttcttcattggaaaaattttcaactctattttgactagtatctatagttaaagtatctaaaacaggattttttggttctacaaaatctaattttggatcattaaaaacgactggagcaaaaattttgatatcaagtgattgagaatttgctagttctaaaagactattatcaaattttaagtgtttaaatttgtaagttttttgttctaaagcctcagtgtagccaaaatatttattttcaaaagcactttttttgatttgaataggaatttctttattgtctaaattaataaaatagtttttagtagtatctaaaggcttgtttgtttgaattcaaaaaacacttttttcagaatcatttgaagcattcgaactaatcgaaattaaatttaaattttggttttcaccttcttttgttataggtttttgctcatcatttggatctagttgcttgtcaagagaaggattttgcttactagtttcttgtgaagaacaagagataataataaacgaagaaattgcagtaatagaaaatgaaaatagttttaaaaataatgtttttgtatttttcataatagttttaggttgttgttgttggaatagtattttctgtttttaatttagctaatttggcttgtaaatcatcatattctttaactttttgatcaaaatcagcaaatttaatttctgacttctgttgtgtatcttttttaggaacaaatcctgtttgtgtatattttgttaattcactttttataattgctaaatttaagtaagtattgtagtagtataaaaagtcttctgctagtttgttaatgtcagcatttttatcttttaaaatgttcgataaaaaatcagaaattctttgttttactttatttttctttgtttcaatagcttcatcattagttaaagataatgtaagttgagaaataaaactatttatataatttaaatcatcacctttatttcctaatgagttttcatctaatccaaacacaaagtaatcttcaagttttctcatatgaaaaccaaaatcattttctttatatttatgataaccactatttcaactagaatcatcaagtttttcttttggaacaatatattccactttttgaccatctttttgtgtattgaagctgcttaatgtttcataaccaaacacagcagctaatgcatttctaagtcctgtaaatggttttaatttagttttgattttatttgtgtattcagaatcataatcttgtaatgtttttaataaagaatcatatttttctacattatttaaattgttgctttctagtggtttatcattgtttttgatttctcaaggaacaaaagtatttttttcatattcactttgttgtccattttgagaatttactaatacaattttatctgctaattctttatattttttatcaagtttttctttttcttcttttacatagttttttaattcttcttcgttttgactagaagtaaaacctaattttgtaaataaagcttcatattctgttttaattttttgctttttagcttctcattctttgacttttgtgtctaagctactttttaaagaagtaatgtcttgttttaattgttgtaatttagcaagatcttggttatccaaatcattattagtatctattttttcttgtaattctgtaatttcttgttggtaatttccaaggtcttgttctttttctgcttcagatttagttaaaagttgtttagcttcttctataactttttttacttcttctttttgtttatttagtctttcttgttcttcttttgctttttgttctttttcgctagattgtgtattgtttatgccagaatcatcaccttgaatttggttgtcatcagatctacctaatttttctttttcgttatttgcaggaggattgtcagttcttgcaacattgttagtattttggcttccggatgaagtttcattctgtgtattttcagtgttatttttgtttttatttgtaggaacttcttcttttgaagttgtatcttgtccttcactacctgaaccttgcattttattagtttcaggattttcttcttttggaggttgaacaggttttacttcaggatttaattgaccatcttctcttctttttgctattaatttatcatattctgttttagcgggtttaaatgaactagaaatttttttataatcttctttttctgtcatagttttgtaagaagtagctgaaaaatcttttaaattattaagatagttttgctcatctttagatttaaaggctttatatgaatctttaaataatttaattttttctactttatctgtttcaggattttcatcctttaaaagtgtgttataaaatgtagaactttcctttaaaaatgaagaaagttttttaaaattcccaactaaagcttcatatttttctatatcagtttttaaatttttaaatttagtttcagtatcttcttttatgtcagcttggttaatatcagcttggatatttgttatagttgcttcaatgcttgctaaatttgtttttaattcgcttgtatttaaaacatctttaaaaacaatattagtggctatatcatctttaaatttttttacttttttttgggtttcagttataatttctttttgtgttagtttttgcttcttaattttgtagtcttcatcaatattttggcatgatgccaaaaagactaatgaaggaattacagtaaatgaagcaaaaagagttagtatctttcgtttttttgccatataaaaaattataaaaaaagactttcaccttttttaagtaatgtagcaagtataagaagtaaaaaaaaaaaaaaacaagtggtataatattacttgttcttttgcagatagttttactttttaactaaaactaaatttgattttttatctaagttaataatgtatttttctttctcgatcaattctttggctatgattttttttgctacaaaagtttcaatttcctttttaataaatcttttaataggtcttgcaccaaagttttgatcataagcatttttagaaacaaattcttttaaatcagaactaaaatctacaaaatatgagttcttttcaagtcttgtttttaaattagataattcaaggtcaataatttctaaaatcacagatttatcaaggaaattgaaggaaattatttcatctaatctgttaataaattcaggtttaaagtaatttaataacctatcttttatttggttaaagtctaatttttggttttctaaaatttcttttgctcctatgttggaagtaaaaataataatagtatttctaaaatcaacttttcttccctttgaatcagttaaaaaaccattatctagaatttgtaagaaaatatttacaacatctggatgtgctttttcaatttcatcaaataaaacaattgaataaggatttaatctaattttttcagttaattgccctccttcttcatgtccaatgtatcctggaggtgagccaattaatttagaaactgagtgtttttccatgtattctgacatatctagtcttacaatttgattttcagagtcaaataagttataagctaacgcacgagctaattctgtttttcctactccagtaggtcctaaaaataagaaagaaccaattggacgattttgatcattaatatttgctttaaatcttaaaatagaatcagctactaatttaatggcttgatcttgaccttttacttttttagaaagattaatttctaaattaagaagtttatctttttcagattcaacaagtttttctactggaatttttgttcatttagaaacaatatttgcaatatcttgttcatctacaatttctttaattagttgattttcttctttgttttcttcaagtttttctaactctttttgtaaagcaaacattttgttatagacttgacctgcttctacatatttttgttctaaagccaaattatccatttttaattttaagttgttaattgcttcttttttgttggatatttcaaaggctttttctttttcttgagttcattttttagttaaagtctcaatgttttcatttaagtcttgtacttctttttcaagtctttcaatttgtgctttgttttctggtttttcatcactatttaatgcaattttttccatttgtacatacgctagtttttgttttaatttatctaaaacttctggttgataattcatttgtacttttaaattagcagctgcttcatctactaaatcaatagctttatcaggtagaaaacgatctgaaatatatctagcagataaattagcagcagctactaaagcagaatcggtaattctaactttgtgaaagtcttcaaatctttgttttattcctcttaagatagtaatagtatcatcaactgttggttcattaataaagattttttgcattcttctttcaagtgcactatctttttcgatgtattttctatattcatttattgttgttgcaccaattaatttgatttcaccacgagccatcattggttttaaaatattagccatatccattgaattaccacctgaagctccggttccaattaataagtggatttcatcaataaacataataatatttccatctgatttttcaatttctttaagaactgattttaatcttttttcaaattctccttgatatgatgcgcctgcaattaaagcagtaacatcaagttctcaaatttctttgttttttaaattttcaggaatttgtccttggtgaattttgattgcaataccttctacaatagctgttttaccaactccaggttctcctacaaggactggattattctttgtttttcttgataaaatcttaattatccttcttatttcttcatctctgttgataacaggatctagtttattttctttagctaattttgttaagtttctcccaaatttttctaatacatttgtattttcttgattcatttgcatatttatacccccttagtatttacaatattataacataaaattggcactcaacaagtaaaagtgccaaaaaataaaagtttttcaaaaatatttttaaaaaaccaaaaatataatataatgcgattttaaagagcaaaaaagtatgaagaagaaaacaaaaagtaaatttatagcaaccttaacattaacaacaattattactccaaccttatttttattatcttgtggtcaaacagcccaaactactccgtcagttgacaataacaagacttctcaaccgactcccacaccttctactccgccaactgacaacggaaattacgaatcagcaacaactccgccatctgacaacggaaataacgaatcagcaacaactccaccaaaacaaacaactccacaaactccgccaactcaaccaactccaccagctgacaacggaaataacgaatcagcaacaactccaccaaaagaaacaactccagaacctcaacctccacaacaaactactccatcagttgacaaaaacaagccttctcaaccaacccccccatcttctactccaccagttgataacggaaataacgaatctgcaacaactccaccagcaggaacaccttcagaaactccgccatctcaaccaactccaccagttgataacggaaataacggatcagcaataactccaccagcaggaacaccttcagaaactccaccacaaccaactccacctcctttacctattaaaaaaccagaaaaatcaacagaagaaaaacaaacaatcgatactactgaattagatgatcaaaatgtttatcaagctaacaaagactacattaaagtaggtttttgaaacattttgaattacaatgacaatataaaagataaaaaagattcttttgcaaaaacttataaagcaaaaatgttggcaaaaaccattgaattcaataacgctgacattgtaggactagttgaagtaaactcaggtcaaaaaaacaaagtaaatggtgtcgacagtatacttgaaactttaaataaagacaatcaaaatgcacaatgaaaatcagttgtaagtgatgcagtgcatggacaaggaaacgaaggtcaacatgaacgaattgccttcatttataaagcatctgtattagatattttagaaattaataaggaaaaactttatgggtcaaatccttatttaattaattatgaaaaccctttatttgattctgtacctgcatatttcgcgactcataaagctaaaaaaggaaaagtaacttttgataaaaaattaactactaaaaaagtagattttgttagacctccagtagcagctaagtttaaattaaaaaatagtgagcaagaatttgttcttgtagcttctcattttgatgctcctggtgtaaatagcaacccagtgcaacaaggaaaagaagaaggcgaagtagataatactaaatatgattctaaaaatggatcacaagaaatttctgaagcaaatcacatgttagatactatgaactgatttgaacaaaaaacacaaacaccaaatcagttttttatggcagatacaaatattcatgcagcttcaaatgacaatgcttttgaaaaattacttacacaatataaactattaatttcaaaagacgaaaatacttcattgggttcaacttttgataaatattcaagttcatatgataaaattttcttcaaaaaagaaggaagtttaacaacaaaaaatgtttacaaatatcctttatatgatgtagtaaaagacaaactgactactgaagatgaattaacacaagttttaaatagtaaagcaaaaaaaggtaaaccagttgaggatattaaagataaaattaaagatctaatttctgatcattctccagtgtttgtaagtattaaaaaagctataaaaaagaaggataattaacaaaatataaaacaaaatatgcaaataaattgatttccaggacatatgaaaaaagggttggatgaaattaaagaaaaagcccttattgcagatgtttttatcgtagttttagacgctagagctccgcttagcacatataattttgaatttgataaaataagtccaaataagcctaggttaattgttttgactaaaattgatttagcagataaaccaaaagcattaagacttgttaagcaacactttgcaaacaataaaaatatagtagtatctgttaatttaaaagaacaaaattctaaaaagataattttaaattcacttaaaaaattacaacaaataaaaaaagaacaaaatttgaaaaaaggaattttaaattctcaattaagagcttttgtggttggcattccaaatagcggaaaaagtactttaataaatttattagcaaattcaaaagttaaaacaggaaatatgcctggaattacaagagcacagcaatgaatttctactgataatttaatgcttttagataccccaggaattttgtgacctaaatttgataaccaagaaaatgcctttaaattagtagctattggttctataaagcaagaacttttccctctaaattttttatttgaaacaagttataaactactttctagattgtatccaacaaggattgaggaattaaaattaaagcctacttttgatgatgtagaaattcagaaaaatcttattcaactagcggaaaatttacatttttataaaacaaaaaattccaaaaataaatcagaagaaaaagagtttgatttaaatagaacaatgcaatgatttattaatcatattaaaaaaataaataatttaacttttgattaaaatgtagtataattaattagcaatttaccaaaataaaaaaattaataaaaaaacttgttattttattaaaaaattgtataattataaaacagcaatgtaagctcgagtggcggaacaggtagacgcaagggacttaaaatccctcgggagcaatcccgtgctggttcaattccagtctcgagcaccattatgcgcccttagctcagcaggtagagcaaatgacttttaatcattgggtcagaggttcaaatcctctagggcgtaccatttcaaaaatgaccaaaataagaaaaagtatttactactttttcttattttttataaaattaagatatatttaaatcagaaagaagaattatgattaaaaaaataggtatcttaacatctggtggagatgcaccaggaatgaacaatgcagttagagctgtagcgaaaaaagctttattacatggaatagaaccattgctaataaaagaaggctacaaaggcattttaactaaacaaattttttcagttcaagattttgatctagacaaagcttcttcagaaggaggaacagttattttctcctcaagatttcctgaatttcaaaacgattcagtaagacaagaagccaaaaaaatattagatgaatttggaatccaagctttagtagctattggtggcgatggaacttacaagggagcctatgaactacacaaattaggagtaaaagttattggaattccaggaactattgacaatgacattcaagagactgattacacaataggttttgatacagctttaaatacaattgttgaatcagttgataaattaagagacacaagcagatctcataaaagatgtttcattgtggaagtaatgggaagagattgtcaagacttagctctttatggtggtatagcaacaggcgctgaagttattattacaaatactcatattttaactgaagaacaaatcgctaatttagttgatcaacaaatgaatcaacaaggaaaaacaagcacaattgttttaacagctgaacatatttataaagatttaaaagcaatcgctaagtttgttgaaaataaaacaggtatagcaactagagcaatgtcactagagcatacacaaagaggtggaagaccttcagcatttgaaagaatcttagctactcaaatggggcacaaagcagtggaattattattagaaaacaaatccggtttagcaattagtcataaaaatggtaaaattgatgctgtaaacattacaaaagtctttgttactaaacagcctcaagacaataaattagtattagaatacaacaaattaaatcaaatttaaaaggaaaatgatgcgtaaaattagaagactagaaatggctaaaagaaaagaagaaagaagattaaaaacttctaaattagctaaaaaagcagcagctaaaaaagcagctcaagcataaaaaaataataatacaattaagtgcatttatgcactttttttataatttttattgtaaaatactaaattatgagtaaaaaaattaaagttaaattagttgataaagaaaaattaacatttgaattgctagaagacgcacaaaaaggtgatagattcacattaacagatgaagatagagagtgattacaatcaatcgactcaataattgaacaagacatagaaaaatacatatctgagaagaaaaaagaagactgaaaaaaagaatttttattaaacgatgaagaagtaaataagttaagagaacaaatagaaaatttaaaaacatctcaaaataaatctagaaaccaaattgctaatttagaaaatgaacaaaaaattgaattagataaaaaagatttcgaaattattcgtttaacagataaactaaatgatttgactaattctcttcaagaaaaagaagaagagttacaaaaacgctttgaagtgaaacaagaaaatttaataaatactcttgaaacagaaaaaaaagtactaaaacaagaatatgaatctaaagaaaaccaaaaatttttagaacaaaaagaagaacttacaaagcaaattaataaagaaaaagaagaattttttaacaaacagctagaacaatctaaaaacgattgaaaagaactaaaagaacaagaaaaagaaaaatacgaaaaagatttgacagaaaaacaagaaattattgaagatcttaaaaaacaattagacagaagacaacatacaaattcaaaacgaattggtgaagattttgaaaactgattacaaaaaactttttatgaaagtttttctaacttagatgaaacagttacatatgaaaaaataactaaaaatgatgctaataatgaaaaggcagatgcattaataaaatttaattttttctcaaatgttaaaaaagaaaatattcaagaaactattactattgaagccaaatccgaatctaattctggttcacaaaaaaattcttcattttataaaaaattagatagaaatagagaacaacaaaaatctaaatatgctattttggtaacagaattagaggaaaaagatgagttttctattaaatcagtatctgaatacaaaaatatgtatgtatgtagacctcaatactttattttactaattaatgttttatttcacttcgcaaaaaaagagagtgaacttacaaatgttgaattaaactttaaaacaaaagaagaaatacaaaaagaatttgaaaactttaaaaaagactcaattgaaaaattagttgataaggtagataaacaaattcctgatatgttcaaacaagttgaaagtattgaaaaagctgttgaaaaattaagagaaattcttaatgataaatttgtaaaatatttcaatcaatttaaaagtaaattagaagaattaacaataaaaaaacaattattgaaaaaaatagattctataacagaagatgatagctactaaattaagaccagaaaatttagatgaatttgttggtcaaccacatttaagaacattacttaaaaaacttatacaaacacaagataaatcttcttttattttctacggaccttcaggtacaggaaagacttctttagcaattctgttagcaaaaaatttaaatttaaaatttgatatttttaatgctagtatagaaaacaaatctgatttgcttcagaaaataaaggataatcaagttttaatcatagatgaggtacatagactaaataaagataaacaagacattttgctttcacatttagaacaaggagaattaactttttatctttgtacaacagaaaatcctttttttaaaatagttcctgcgataagaagtagaacttatctcttagaatttaaacctctaagttttgaagatatatttttaagactaagtttatacttaaaaaataataatttaggtcaaataatagacgataatttacttaaatttattatcagacattcaaatggtgatcttagacaatctttgaacaatttatctttaattttgaagctaaataagaagaaaaacatagaaaaagaagacataaaagcaatcattccatcaatgaatttttattcagatgaaaaaggtgataatcactatgattatttaagtgctttccataagtcattaagaggttctgatattgatgcttctctttattatggagctataatattacattcgggagatgttgatggcttaattagaagactcatcgctgttgttcacgaagatataggtctagctaatcctttgctttctataaaagttcaaagtgcaatttgagcaatggaaagactgggcatgcctgaaatgaaattacctcttgctcatattatttgtgaaattgctttaagtccaaaatcgaattcgacatatttagcttttgaaaaagctcaagacttgataaactcaaatcaaatttatactcccccaaatcatttacgtgattcgcattatcagtcagcttttaaattaaatcgtggtgttggttataaatacccccatgattttgaaaatcactgaatttttcaacaatatatgccagataaattaaaaaatcaagtattatttacatactcaaattctcaagctgaagtaaaatttaaaaaatattgagataatataaagaaaaatgaaggaaaaaatggattataaaaaattactaaatgaatttgtaattaataatttagaagatttaaaattagctaaaaatactttttttggtaaagatagttatttagctcaacttcaaaatcaactaaaatctgcttcaaatgaagaaaaaaaagaacttggaaaacaaattagccaaataagacaagaagctgatactttctttcaaaatcaagcaaaattacttgaagaaaaaagaataaatgaacaaattcaaaaagaatgaattgatataaatttaccaactaatagctttgctagtttacaccctttaactttaattgaaaccagaatcagagaatgatttttagtaaatggttattttgaagttaaagctagtgaaatagaaaatgatgaatacaattttgaaagactaaatattccaaaaaatcatccagctcgagatatgcaagatagtttgtatatagacgaaaaacatttattaagaactcataatactggtgttagtgcaagaatgttagaacttaataaaaacaaagcatttagtcaattttgtatgggtaaagtttatagaaatgatgaagatgatcaaacacattcacatcaatttagtcaattagactttatttctgtaggtaatttaactattactgatttaattggaaccttaaagagttttttaacttatgttttcgaaacagatttagaatttaaattcagaccttcatttttcccatttactgaaccatctttagaggtagatattttttataaaaatagatgaattgagattttaggctcaggaatgattcatccaaatgtgctcaaaaaagcaggatatacaaacaattttagagccatagcagcaggtgtaggtcttgaaagacttgcaatgattaaatacggaattgaagatattcgagaactttacaaaaacgatttacgttttttaaaacaatttaaataaaaggatttgcaatgattttttcacttaaaaaattaaaacaattagctaatttagatgaacatatttctttagaagacattacaaaagctataaattccattggttttgaactagaatctgcaacaaaattaaataatattaaaggaattaaatttggacacattgttgaactttataaaaatccaaatgcagataatctaacagtttgtaaaatagaatttgaagataaacaaagaattattcaaacaagagctacaaatttaaagcaaaatgattatgttatggcttttgttccaggcgcttctagtggtgaaattactttcagtgctaaggaattaaaaggaataatttctgaaggaatgttagtgtctttaaatgaattaggctttgatgattctttagtttctaaagacttagcaaatggtatttttagctttaaaaaagtagatttatctttagatcctttagcttttttcgacttagatgattatttattagatattaaaattttagctaatcgtgctgatgcaaattcttacttaattatggcaaaagaattagcagcttactttagaactacaacttcaaaattgtctataaaaacaaaacctagttttaaatctgactttatttttgaagactttttagataataaactaactggaatagaagctaaaattgacaatgattttgaacttagtattcaagatcaattacttttattaaaatcttcaattaaacttgtaaatccgatcgttgatttaacaaatcttactttaattatgacaggtcaacctgtacatgtttatgatgtagacaaattaaaaaccacaaaaattttaaaaccagctataaaatcaaatgttagcgaaaatattttaggaaaaaaagaagtaaatgtttctaattctttagtcattaccaacgaaaatgaagaagttttaacttttccagcagtaattggtttggaaaaaaatgcagttgattctgatagcaaaaatgttttatttgaaatcggaatatttgatactacacaaacaagaaaaactgtaaaagaattaagagtttctaacttaacttctaatagagctattaaaaattttgcttatggttctattcatcttgcacacaaatttttaaaatcacatttaaataattattctttttcaataaatttaaatgagattcaaaaacaagaaatagaattaaatattcataaaatgcaacacattgcaggtgttaaattctgttgtgatccagagtttaaaaatactatattttctctcaaatctttaggttttgaatttgattttaaaaacaaaaaagtaaaaatacctacatatagatatgatattgaactaaatgaagatcttttagaagaaattttaagattctatggttatacaaaattagaaccaactgttcctaaaaatacagtttttaaaattcaaaaaaccaatactttaaaagaacaagtaaaagtattaggttttaacgaaattaaaacttatactttaatttctaaacaaaaaaacgaatttaatccatttgattttgacgagcaaataaatctaaaaaccttcttatctaaagaaagagaaaccattaggaacacacaagctatttcaatttctgaagctttagaacataatattaaaagaaaaatttctaaaattagcttatttgaaataggaatgattaattcagagatcaacactttaattttagccactactgaatttaatttttttgaattaaaacaaaaattatttgatttattttccttagattttgagtttataagaacaaattcagaacaatttcataatggagtttctgctaaaatatattataatagtcaactaataggttgaataggtaaaccacatccaaaattaaaattagtagatgcattttatctagaaattaatttagatgctattaaaaaatttgtaaaaaatattaaatttaacccatatgattctaatgaattaaaaaccagagatattacttttactctaaatacacatcaatctatagaagaagaaataaataaattaaaagatattccaggaattttttcaatcagtttaaaagattctataaatatagataaaaaacaaaaaattacactacatttagtgtgtgatgaaaaatctatagaatttattaacaaaatttatgaaaacctgttataattattcttacctactcacattgaaaagaaatttaataaaattttatgaaatataaaaaattttgttataattattatgctttttaaatttagaaacacaaaggagagataatggcaatagtaccaaagcgtaaaacatcaaaacaacgtaaacacaaaagaagaactcacgatgtattaacatcaccaactttagtaacttgtggaacttgttcaggaaaatcattacctcaccatgcatgttcaaattgtggtttctataaaggtaaaaaagttattgaaggtctacaaaaataaatttctttaacttcaatatgtgctagaaatagcaaaaagccgatttagctcagcggtagagcagctggctgttaaccagttggtcgcaggttcgatccccgcaatcggcgccatattggcccgttggtgaagcggttaacacacatggttttcatccatggattcacgggttcgatccccgtacgggtcaccatttttaggaagattagctcagctgggagagcatcgcccttacaaggcgagggtcgtgggttcgatcccctcatcttccaccatatgccgtcttagctcagctggcagagcaactgccttgtaagcagtaggtcgtaggttcaaatcctatagacggcaccatttatgttacttggtagttttaattaggttcgattcctataaaacatacaattaagcgcgagtggtgaaattggcagacacgctagatttaggctctagtgctttatagcgtaagggttcaagtcccttcttgcgcaccaaatgtagaattcacctcctttcttgaatttacactgtcaagaacaaaaccaagcatttcgcttggtttttctttctttttaaaggttatctatgattaaattgctttataaaccaaccaatattacatcatttaagtttattaaaaattacgctagagaaaataatattaaaaaaatcgggcacactggaactttagatcctttagcctctggattaatgttgatagcaacagatgaagacacaaaattcataccttatattgacacaaaagacaaagaatatattgttaaattaaaatttggctttatttcagatacatacgatattgaaggtaaaatagaaaaattttctaaaaataaagtgtctttaaagcaaatagaagaacagttaaaaattttagttgctaaagaagaacagataccaccagttttttcagctaaaaaagttaatggattacgctcatatgatttagctcggcaaagcaagtttttggacttaaaacctataaaaatcaaggtatttgcatataaaattttaaattttgattacgatacacaaacactgaaattacaatttatagtttcaagaggaacatatattaggactttagctcatgatttaggtcagatgttgaaaattggtgcaattatggtagaattaacaagaacaaaaataaattttttagattcttcttttttaaatcaagatttaaatgttttagatttaatacatttaattcaaaccaaaatagacaaatttcagctacagcaacttatacaaggtaaagttgtttcttttgataaaaattacgaagaccaagaagaaactttactagtaattcaaaatcaagcagtgggtattgggactataaaaaacaagattttaaagtctaaaaaactttttggtaataagataaaaataatactaaacaaataaggaaataaaaatgaaaagtaaaaatataaaaatatttgcaaccgatattgatgatactattttaccttcgggttataaagatattccaaacgaaataattgatatgttttctcagcttcaacaaaacaatatcaaaaccgtgttagtaactggtagagatttagttactattggaaggcatattaatacaccaaatattgattattttattggagcaaatggcgcatttatttatgattttgcaagaaaaaaaataatctgagaaaaggaaatcagctttagtgattttaaattaattgaagactttgcatatcaacaaaatgtagaatttgtaataatggatcacaaacatatatattattcagatggacattcagatttagattcaccatttttatcaaaacatcaacataaaatgaagtcaataaaagactacactggagatactccactacacattattactattaaagaaaaatatccaaatccagatattatgagaaattttgcttcatttttaaaggaaaaaaatattcaagcagaaattagttcaagatgaacttatggtttttttatttccccagttaacattaaaaaaagtattactttaatttttctagcaactcttttaggatttaccaaagatcaaattatagcttttggagattcttctaatgatgttgaaatgattagagatgtaggttatggagtagcaatggctaatgctttagatgaagtaaaaagcgttgcaaaagacattgcagaagatacaagagatcttggagtatacaaaaaagcaaaagaattaaaactaataaactaaatattattatgacaaaaatttattcttatcctttagattcgaattttaaatttaacaacgctagttttgttttaggttcttttgaatcttttcatattggtcatcaaaaattaattcaaaaagctaaagaactatcagatacagtagttgtatgtatggttaaaaacccgattaaattacctaaaagcaacgggttggtattttctgatttggaatccagaattcacgctttagcaaatcaagaaattgaaaatattttgcttatagactttaatgaagagatacaaaacatgactggtaacactttcatagattctttaatcaattcaggagctagctcgtttgttattggtaaagactttaaattcggtcgctttgggcagtgaaatgcttcaattttaaaggaatattttccaaacacacatataatagaacacacaaaagacactcaacaaaatataaaaatttctacaaaatttttaaaagaaaatctgaattttggagaaattagtttacttaattcactactcacagaaaactataaaataaaagtaactttagattctgagaaaaaattccagtgacctgaagaaatagaaaaattacacacaggtatttatatagccaattttttgtcaactcaagatttagaaaaataccacggaattctaaaaattgattttaaaaatccttcaatagcagaagtcattttgtttgacttaactcaaattgaaggaactctttcaggttttgttgaaatagtaaaagaaattcgtttagtaattcaatcaaaaaataatgaattaacaaatttcgatataaaaacagccaaagagtatcatttagaacaactaagagcgcttaaaaaaatttcaaattaacaaatttatatttataatttaatgcactatgaagaaaaagaaactttatttaatatccacactagcattttcaacagctttatttgctatttcttgtggtgaaacacaaactgctcctgtgaaaaaaccttcacctatgacacctatagataaatctaaacctggagattcattagaaaagaaaaatcctgattcagataaaagtagaacagatgaatcacaacaaaaaggaagtactaaatcaggaaatacaaataatgcttcaccagaatcaggagttaaagaagataaaatgacaactccaggaaatccaataattaaaatggatatggttaaagaacaggataagaaaatagctccaatagaaagcaagaaaatggatgaaaataaatccatagtagaaacaaatccgccacaaaatgaagaaaaaataagtaaagaatctaaaactcaagaagaattattagcagaagaaaagaaaaataaagagattcaaaataatttagaaatagatttttttaatttagataaagactttttaattgctcatacagcaaaatcttttgacactacaactgctttaaataaattcaaatcagatgaatacaaaaattttgactatagcaattttgtttctaaattaacttcaaatgatgaagaatttaaacaaaaatataatgcaaaattagattttacaaatgctgaagaagataaaaatagaaagatactaaaaaatgtaaaattaaccattacttctaaagaaaatccttcaaaaatgaaggaaaaaagtattaatatatactgagaaaatcaaaaagtagaaaaattacaaacattagaatcaaatataatagtgaaaactccagttgctgaattaaaacaactttttccttcttttttagcttttagtttattattttctgattctagtgtcggtgtatttaataaattatataattctgaaggaagcatcgtaaatataccttcaattccaagtattaacttgggctgaagaagtgaatttgttgaagtaaaaaaagtgaatacagacaatggtaataccaagcagtatcaaattaaaatagataaagttaagttcaatgattttacaggtgagttatgactagaagttaagctgttcacatttgaagacaacgaatttgcttactacaaacaatactattttaataattttagaaaatgaaatccaaaatctgattttacatttaaattaaatccttcttcatctgattttaaaaaaacagacacattcaaacaagttgtcaaaaaatacaaaacagaattagaaactaaaaacagtgtaaatatcacagatagtgatcaaataaatgttcttaaaaattttattattgacaaccttacactaacttttccagaaacagaaaaagtttactcattaaagaattttaaaatttctgactatcaagcatcagatccaaaagcatcacagcaaaaattcattatttatcctttaatgtcctttataaattccaattctgtagctgattctagtacttttaaaattgaaaaacaaaacgataaatatttattaaatattaactcggacattaatatttatcctttcacattaagtaatttttctgatctaaaagacatttctcattcttcagcttcgcccgtttcattcaaggtaatatcatcgatcgatgtatctgatattataaaaaataattaatattaaaataaaatctactgaactaggtgttttagtagattttatttgctaaaatttaattaaaaatttaaaggaaattatgaattcaaaattaacttcaaaacaaattagacaattatgacttgacttttttaaatctaaaaaccatttagaagttgaaagcaaatctttagttcctgaaaacgatccttcattattgtgaataaattcaggtgttgcaactctaaaagattatttttcaggtaagaaagtgccaccaagcaaaagacttactaattcacaaaaatctttaagaactaacgatattgaaaatgttggaatcacttctagacaccatacaatgtttgaaatgctaggaaatttctctatcggagattatttcaaaaaagaagcaattgaatatgcttttgagtttcttactacagttttaaaatttgatgttaataagctttattttacttattttttcgaagatttagatactaaagaatattgattaaaattaggaataaaagaagagcatttaatagcaggaaccagaaaaacaaacttttgagatatgggaattggtccttgcggtccttgtacagaaattttctacgatcgtggttcaaagtatgattcaagaggtgttgaattattaaaagaagacattgaaaacgatagatttatcgaaatttgaaatattgttttctcacaatttaataacgatggtgaaaacaattacactcctttaattagtaaaaatattgatactggtgctggattagagagaatagtttctataattcaagatggtccaactaattttgatacagatttatttttacctataattaaagaaattgaaacaatgacttcctttaagtatgatgtagaaaattacttcaaaaaagaagaaaaacaagcaaaaattaattcaaattttaaaattattgcagatcatattagagctgttgtaaatgcaataaatgatggtgttgaaccttcaaacacctttagaggttatataatcagaaggttaattagaagagcatacagaattgggaaaaaattaggaattaaagaagcatttttatacaaattagtaaacattgttaaagaaactttaatttacgaaattgaagttgatagagtaagtgaagtcataaaaaaagaagagttgctatttgaaaaaactattgaaaatggagggttattacttcaaaaagaaattgaaaacaataatcaacaaatagattttgcggttgcatttaagctttttgaaacttttggatttccaattgaacttactcaagaaattttggctgaaaaaaatatagaacttgatatgaatgaatttaaaatttatcaagaaaaacatgctcaactttctatgggttccaaaaaactaggtatgaaaaaaactctcaattctttggctctggttgaaggaaaaatttccgagttcataggttattccgaattaacatcaaaagcaaaaattgtttttttagctaatgaagaagaacaaataaataaatctttagctaatcaagattcctatgttatttttgacaaaactcctttttatgcaactgctggaggtcaaaaacatgatcaaggtgtcattattcaaaacaataataaaattaaagtaaagcaagtatttaaagacaaatttttaaatcatgttcatgtcatagaaggcgaacttgacaaaaatcaagaagtattacttgaagttgatgcaacaaacagaacaaatctagaaagaaatcactcttcaactcaccttcttttcaagtccttaagagaacaatatggaccacaaatcaagcaattaggttctgataacaacgaagataggctcaccttcgactttcctttagataaaaagccaactccaaaagaattaaaagaaatacaagacagagtaaattcatatattgataaaaatgtagaaagacattatttagaaacttcaatcaaagaagcagaaaaactaaatgcaattatgacgcttgaagaagctgaatatatggatccaaaacatgttagattggttcaatttgaaggaattacaactgatttatgtggaggaacacacattgcaaaaactggtttaattcaaagattcaaaatagtttcttgtcaaaacaaaggaagtggaatttttagaattagagcaataactacctttgataaaattcaaaattattgttttgagacttttaaagagaataatgaagctttaatgaaaatattagaaaaaaatcatcagctagatccgacatatcgtggaattccatctgttcattttagtagtgattgagaagctagtgtggaagaaatagaaaaatatcttgaaattgctaaaaacgataataagttattgcaaaaaaaagcttcattaataaaggaaaatcaagaattagaaattgatccaagcaaaattttagaaattaataatcaaaaaatatatctagatttagacattgattcaggtcaaaatcttaaattattagcagtaaatttacgagaaaaatttgttgacattgattttgtattgggacaaaagcaaaatcaacatttattattagttattgcttcaaaaaacaagcaagctagagctatttttgctcaacttcaatcactaaattctttaaaaggtgggggtagtgatattttagttcaagctaacttagtttgatattcaaatgtggaaacaacgattaaaaatattttaaaaaatccttcataaaagaaggtttttactatataaatttacaaaaaatcacaatagtcaaaggttagttatgaaagaaaaatttaattatctctgtgaattagcaacaatgtttttgggtccaaaacgtatacacaatacagaatttgtagaagaatgttatttaaaagaagtgataattactaatgtttttccaactttagaaaacggagttcaatacttttcagtattatttgataaaactatttttaattcagaagataaattgttggggaaagtattgcaaaataataaggtggttgctgatattatttctgtttgcaaaaataattttatccacattataaaggaaaatgaagcacaaaaaatagattttcattcaccagttacattagtagcatatggaaaatcagatttttgtatgtccttcaataaacaatcacattggcttctaaatttggaaaatattcatcaattaaatacacaaatgcaagaaaacattgataatctttgagcaaatccttatgttaattcagatttttactatagacaaacaccagaatatgttgaattagcaaataaattaaataatgattcaaataatccacaaaatttagttagatttttagtcaaaaaaaatcatgacctacttgatgatgtgcaaatgaagcattttaatgatttttatagtaaaaaagaattttcagaaactaaaactaatgatagtgaattagcttcacagtttttaaaaagtattctttcctatagtaaatttacccatatattggaaaacgataacaacaaaaatccttcatttcctgaagtaattgtggatatgagtgtttcagatttaatagattttgattatttagcattagttggatttattttaaatgaaaatgccacatttatttttggtaaaaagttaaacactaatgaatttaagattgaaatttatacaaaagatattgaacaaattcaacaagacctttatgttatttttaaaaacgatattttcaaaactatagaattttcttataacacatctttaaatcatatttcatgcacattaaaaatagaaaaatctttatccattgagtttaatttagagataataggaaaaatcgaaagtatatttaaaaattattttgataaaaaaagaaaaagaaaatatgaaaagaataatcgccctagatttaggaagtaaaagttgtggttttgcaatcactgatgcacttagattaacatctcaacctttagaaaattttcaatttcaagaacataaattaaatttagtcattgataagttaaaatattattttcaagaatatgatattgaattagttcttattggttatcctcttagcatgcaattaaatccaaccaaaagttctaaaagagtagattattttgttaaattatttcaagaatattttgatattcctataaaattagtagatgaacggcaaacaagcaaaatagctcatagtattatgatcgagcaaggtttaagtagacaaaaaagaaagaaaaataaagataaattagcagctcaattaatattagaaagttatttaaatcaataaaaaatgaagaaaaatgaaggaaaatatgaaattaattgtcggtttaggtaatccaggggaacaatacaaattaactaaacataacgttggttttcgtgtgctcgataaacttgcagaaagtttaaaagtaaattttaccaactgaaattcaataggtcttattgtaaaaactccagattatatacttgccaaacctcaaacttatatgaatcaatcaggtttgttagttagtgagttagttaggttttttaaaataaatatagatgatattttaatagtttatgatgatatggattatcaagttgggcaagcgattatgagaacaaatggttcttctggtggtcacaacggactaaaagatatttttagattattaaatacacaagaaattaaaagattaaaaattggaatatctcgtgataaagatagcaaaaattatgttctgactccttttaattcagttcaagaaattattattaaaaaagttatagacgaatgtgttgatattttattgtattacttatataatgattttagaaaagcaatagaaaaatttaatgttaagcaaaaccaaaacaaaaacaagcctattagcagttagcggtggtccagattcaatgtttttgcttaatcaatttaaaaacaaaaacatcgttgtggctcatgtaaattatcatttacgaacagattctgatattgatcaacaaatagttgaaaattattgtcaaaaatacggaattaaactagaaattttatcagttaataaaaaacaagaagaatatcataatattcaaaacgaagctagagaaattcgttatcagttttttaataaaatttatcaaaaatataattgcaaccaactgttaattgctcatcaaaaagatgactttttagaaacaatttttcttcaaaaaatgaagcaaaaaaaagtaaatttttgaggtatcaaaaagaaaaaatttctttataatatgaatataaaaagaccatttttatataaatattttaaacaagaagtaatagatcttttaaataaaaaacaaattttatttgcaactgattcatcaaataataaagaaatttatcaaagaaataaaattagaatagagttaaaaaacaaatctaagatttgaaaaaactctataattttaaaatatagaataataaatttacttaaattgattaagttgataagaataaattatttgttatatagatgaaaaaaaactcaatttgatatagtattttttgaaaaaataaagaaaaagtctcaatttttatatttttttattcataaatactattttgatataaatataagtagtaaaaagcttaaatctattgaagattttttattagccaaagaaagaacaggaaaatatttgctaaaaaatggaaaatatttagtcaaaaaacaatataaagtcattttataagcaaaaaaacctctttttaatttataatattatgactaatcaggaaaggaaatcatggcgaaaaaaacttttaacaaaagctattttagatacattttaggagcgataattttaggaattgtagtagctgttcttctttatcgttttcttttgccatccccgacaatcagatctattagctatttcgatgaacaaattaaaacaaatgcttcatctacaatggataataaattcttttgatctgtaacatatgatgtagaaaattttagaattaaagttgtaaataatcctggaaatgctaactttgctcctgagatttatcaggttgttgcaaacccttatactataaataagtatattggtactttagttactccagttgatagtaaattaccattgagtgtagaagtagtagaagctacaaaaagcccttatgtgctacaaaatgtagataattttaataattttattaaacatatagaagtaacagcttctgcaaataatcttactttagctcaaaactataaagagactttatcttcagtttacaacattttaggtggaaattttggaattgtaaatacagataaagtaagaccaaacttttttgttgcttacattttacctttattaccttgcatattctttatttttatgttctatatgatctgaagaagctacagatcttccaactcaggagctggttcattctttaatccagggaaaaaccaagctattaaaattacttcagataaaagattttcagatgttgctggaaatgcagaagtaaaagaagaaattgaagagtttgtagactatctaagaaatcctaaaaaatatgcagcagctggtgcaaaaataccaaaaggtatcttattaggtggtcctccaggaacaggaaaaactttaatcgctaaagcaacagctggtgaagcaaatgttccatttttctttatttctgcttctaattttgttgagttatatgtaggagttggagcaaaaagagttagagaattatttaaagatgctcgtgcagaatctcctgcaattatttttatagatgagttagatgctatcggacgttcaagaggttcaggtattggtggaggtaatgatgaaagagaacaaactcttaaccaactacttgttgaaatggatggtatggttgaaaatagtggattattaataattgccgcaaccaatagaacagatgttttagatccagcccttatgcgtccaggaagatttgatagaactgttattgtaaattatcctgatattaaagaaagagaagagattttaaaactacatgctaaaggaaaaagaatttcttctagcgttcacttctcaaatgtagcaaaaagaacaccaggattttcaggtgctcaattagaaaatgttattaatgaagccactttactctctgttagagaaaaaacagatgttattacaaatgaacaaattgatgaagcaatagatagagtaataggtgggccagctaagaaaaatagagttattactgaagcagaaagaaaaatggttgcttatcatgaagcaggacacgctgttgtcggagttaagatgagagcaggagctaaagttcaaaaaattactataattcctagaggtcaagcaggtggttataatttaattcttcctgaagaagaaaaatacaattctactaaatcagaacttttagcaacaattgcaacttttatgggaggtagagcttccgaagaaattaaatacggaaaaaacgaaatttctacaggagcagctaacgatatagaaaaagcaacaaaaattgctagaaaaatggttacagaatatggtatgtcttcattaggtcctattcaatatgaagaaaacacaggaagtcctttcctaggtcgtgattatgcaaaaaatactttattttcttcaaatgtagcacatgaaatagatattcaagttagagaaattatttcaaaagcttatactcaagccttagaaataattcaaaataatctcgacttattagaattgattaaagatacactacttgaaaaagaaacaattgttgccgaagaaatagattatttagtaaaacatatgaaacctttagaaacgaaacctaaagaagaaattaataaaaaatcaccagataaaattcttgatgaaataattttagaatcaaaaacaaaagaactgaaaaaagaagaaaaagatgaaaaatcatcttcagaatcctttaaaaatgaagaaaattttgaagataaataaaataacaaaaacaagtaaatttataaaatttgtcaaataaatctgttttataacattaaatttttataatttaatgttctttttatgtaaggggaaaaaatgtcaataaataaattaacagaacaagaacaagtaaggttaaaaaaattagaattattacatgaaaaaaacattcaaccttattcagaaactaaatatgaaaatgatcagtgaaaaaatattgtatctgaattttcagcaatttctaaagaggaactagagcaaagaaatcataatataaatctttcaggaagaattgtggcaatgcgaggaccatttattataataaatagtttttttgacaaaattcagttgtattatgataaaaaattacttgaaattaaagaaaataaagatctatatgaattactagatttaggagatatcattcaagtaagaggggttgtttttaaaacaaaaacaggtgaattatctcttaaagtgcatactttacaacttttaactaaagcattaaaacccttaccagataagtttcatggaatttcggatattgatgaaaaatatagaaaacgttacttagatttaatttcaaatccagaaacaaaacaagttttcttaactagaacaaaaatcataagtttaattagacaattcttagataatttaaattatatggaagttagcactccaattttacaatcacttttaaccggagcaagtgcaagaccttttacaacattttataactcattgcattctgatttttatttaagaattgcaacagaattaccgttaaaaaaattgctagttggtggtttagatagagtttatgaaataggaaaaatctttagaaatgaaggagttgatactactcataatccagaatttacttctatagaattttatgaagcatatgcaaatttagaaataatgatggaaagaactgaagcaatttttaaatatttagttgacaaactcaatattccaaataaaaaagttgttttcggagagtatgaaattgattttaatttaccttttaacaaattcaatcttgtagataaaacatctgaaattttaggtgttgatttaaaacaacaatcttttgaacaactaaaaactttagctgaaaaacataaaattaaaattgaaaaattttatcaatcaggacatattataaatgctctatttgaagaatttgttgaacctactttaattcaaccaactttcgtttacggtcatccgatcgaaatttctccattagctaaaaaagatccaaaagatccaagatttacacaaagagctgaactatttatagctaaaaaagaatttgctaatatgtttaatgaattaaatgatccagaagatcaactacaacgttttgaaaaccaaattaaagaaaaagatttaggtaacgatgaagcaaatgaaatagattacgattttgtagattctctaaaatatggaatgcccccagcaggtggttgtggtataggaattgatagattagtgatgcttttaacatcaaaaacatcaattagagaagtaatcttatttcctcaattaaaggctaaaaaataatgaaaaaaatatttgttttcgatttagatggaacattactaacacaccaaaatactataaattcctttactttagaagcaatcaaaaaagcaaaagaatcaggtcatataaatataattgcaaccggaagaggtctacaaactacaaaaataatttcagattcttatccttattttgattatttagtttctaacaatggaacaattatttatgacattctaaatcataaagtacacctaaatggttttattgacaaagaaactttaagattattagtacaaacatcactagaatttaaatctttaattgcaatctcaacaccagaagattcttatttatattcttcacaaaataactacacttgactaaattcacaagcggaaatggacttaaatgcctataatttaatttcatatgaacaacttgaaaaactcattgaaactaatagcacaatttcacaatttgcctttagaaattcacaagaaaccatcaaagaaatttattctattttagctacaaaattaaaaaataaatacaaagtaactatcactaatagaatattcgttgacattaatccactaaatgttgataaatttaatgggattgagttcattttaaaacaaaataatttaaaattagacaatgtagtagcctttggtgattcttctaatgattttttaatgattaaaaatgccaatataggttttgcaatgaaaaatgctaccgaagatttaataaaagtagcaacaaaagttattggtgattgcaattcagatgcgatcggaaaagaagttttaaaactaatttagtttatttttcttcaaaattgaagaaaaataaaaacacaaaaattaattttttgtgtttttattaataaacgaataatcgatatggtgccaacaacaggaattgaacctgcgaccccatccttaccatggatgtgctctacctactgagctatgatggctttgtttagtatatataattatattactaactaacaaaaaaacaagaaaacaacaaaaagaggaatttgtatgcaagtgagcaaagaagaaaagtctataaagcgacaaaaaattagttttgctagtgctttactaatagttttaggttcttgtataggtgctggaatattttttaagtcaagatcagtacttgaaggttcagggcactatctaaccttggcgatttttgcttgagttttatcttcatttgctattatttctatggcattttctttgttggaaatttcttcagtttctactcattctaatacttctttgatagattgaaataaaaaatttaattcacaatttatttataaactatcaagaaattttatggtctttatttatttgccacttacatatttttcaatgcctctctattttgtgcagacacttcaagatgcatatcaagcattttctttagctacgaatgcagattttaattttaatttagattgattaatagtcttgataattgttcttgtttttctttactatttttctattgtaggattaagttccaaactagcaaattgacataataaaatcattttagtcttcaaattccttcctataattattgtagttgtactttcttttgttatgtttttttcaggaggtgcagcaaaacttaattctaaacctacatttttagatattaaagaaatagttgaaaacaaagaaagtttaaaatacacaattccaggaattggctgaattttatctttagccgctattttctttacgtatgaaggattttttgcagctacaggtattcaaactgaaatgaaagaaccaaaaaaaacaccattagcaattttgtttgggttattaatagtaacagcaatctacctacttttagccattgcaatgtcaatagtaggtgatggttctatttcttcttttattagtgttttaaaaaatgacttaaattgaaatgaacaaataatttcttatcttcttggttttacaaatatttttattgctttaggaattttaggaatattaaatgcttttactatgtgaggtccaagattggttgaagagctaattcttcatggagattttaaatttttacaaaaatataaacataaactcaacatagaaaaaccagttgttggaactataataacacttgttttttctacatttttaatcataattttgttcttaattggaacctttgcttttatagatgatagtaaatacgataattatggatcaaaattagatagtctatactcgcttgctgatattttaggtaattgatcggctttaatttcttttgcttttatagctattgcgatttttggagggttaaaaaatagaaaaacaaataaagtaaaagtaacaaaattcaagcactttgtgttattttcagtaatttccttagttgttacttgactaattttaattttctcaattgcaattccaatttttgatttattagctttattttgaataaaagatacaaaagatgtattagttccaagattagtaaaagtcttgattttgtttgctttttttgcaatttcagcttttccgattttcttcgaatctttgaagaaaaagtacttaaaaaagaaaattaaaaaataattttcgtttttttttaaaatatagtactatttaaaagaaatgcaatcaaaacaaattaacttagaaaaatttattagagacgtaaaagatttcccaatcgaaggaattatatttaaagatatttcaccacttttagctaatggaaaagcactacactgcacaattcacaaaatggcagaattagcaaaagatgcagatgttattattggaccagatgcaagaggtttcttgtttggtactccaacagctgcttttttaaaaaaaccttttatcatggtaagaaagcctaaaaaattaccaggcgatgtaattagtttcgaatacgaactagaatacggaacttctactttagaaatccaaacaaacatgctaaaaccaggtcaaaaagtagcaattatcgatgacgttttagctactggtggaacaatgaaagccatcacagatttaattgaatctcaaggagctgttgttcacaaaatagtatttttattagaattagtagctcttaacggaattgaaaaattaaaaaattatgatgttagttcattaatcagagttgaataatcatttcttttcaaacttcaattttatgttataattattgcctataattacaacacaacacattaatccttgatctatattaaatagatccaatttgaccaaaaggagacatcatgtcaaaatacgaaattatgactgttttagctccaggaactgaattaaaagtcattgaagacattttaaaatcagtttttagtgcaaaaaacatcgaaaaattcgaaaaacttgaaagaactgagttagcatacgaaattaaaaaacataaacaaggaattttcgttttagctaacgttaaagctgaagaaagtttaattgaagaatttgttagaagagctaatattttaaaaaaacaaattctaagatttttagtaattaatcttgattcagaaagaggaattaacaaaaccttcaaagcaataaaaaacgataaacaaagatttttctccagcaaaaaaacaacagcttcaacagaagaaaataaaggatttacaaagccatttgctaaaaaatccttttcaaaaaaatctgaagaaactgatacttctaaaacaacagaacacgaaaaaaaaccaagacaaccaagaactataaaaactaaagaagtaaaagaatcaaaagtagcatctacagcaaaaaaagtagaaaaaacagcagaaaataaagagtaaattttatgaataaagtcatattagttggcagaatagtcaatgacttaactttaaatagaacaaagtcaggtcttgattatcttagatttaatttagcaattgaaagaagaaaatttagctctgatgctgaagatattacagattttattccaattgtagcttgaagatttaatgcaataaatatttattcactttctactaaaggctctttaattttaattgaaggttatctttcatcaggaaggtatcaaaaagaagatggttccaatgtctacactcttgatgttgtagtagacacctttagagctttagaaactaaagagcaattagaattaagaaagaaaaaaaatatttctgaatcacatcagccttcatttaaagcttcaacaccatcttcagtaaacgagcctacttttgtcaatgcaaacacttcaaaagctgaaacaatttcagaaaatctacaagcaactaatgatgaaactgacgacgatgacgatgatatattcatagattgaaattttaattctatggatgagtaaaggaattattatgaacaagaaaaataagaaaaaattaaagaaaaaaccttgccacttttgcgaaacacaaacagtttatatagattataaaaatgttgaagtattggaaaaatttgttaatcctcatggaaaaattcaaccttctagaattacaggaagttgttcaaaacaccaaagacaagtttcattagcaattaaaagagcaagaatgatagccttaatggcatttgttggtgaaagagttagaaggtaaaaaaagaaaataaaaaaatttttagttaatctaaaaatttttttattataattaaaattatgtcattaaaagccggtattgtaggacttcctaatgtaggaaaatcaagtcttttttctgcacttacatcttcaacagttgaaattgcaaattatccttttgcaactatagatccaactgttgcaattgtagaaattaaagacaaaagattaaatgaaatagcaaaaattgtaaatcctgaaaaagtagtttatgctaccttctcttttgttgatatagctggtttaatagcgggtgcttcaaaaggagaaggactaggaaataaatttttagccaacatcagagatgtagatgctattattcatgttgttcgttgctttgaagacaacaaaattattcatgtttctaacaaaattgatccaaaagcagatgttgaagtaataaatttagaattaattttatctgatttatcagttattgaaaatgtcttaaaaagagtagccaaaagagcacaaaacacaccagataaaacagctaagttagaatatgaattagctcaaaaaattgaaaaagtacttaaattgggacaaccagcaagaactttagattattcagatgaagaaaaaaagcttttacaaagctgacaactattaagtcttaaaccagttttatatgtagcaaacattgatcaagaatcgattaaaaatccaacaattaataaatattatgttgaattagaaaaaattgcaaaacaggaaaataataaaattattcctatttcagtacaaatcgaatatgaaatcagtttgttaaacacagaagaaaaagaagaatttttacaagagtacaatctcaaagaaccaggtttagatattttaacaagagaagctttttctttattaaatctagctaattattttactgcaggagtaaaagaagtaagagcttgaactttcaaaaaaggttatacagctcctcaatgtggtggaataattcactcagattttgaaaaaaaattcatcaaagttgagataatatcttataatgactttatagaatctaaaggcgaaaaaaacgcaaaagaacaaggaaaacaaagactagaaggtaaaaattaccttgtacaagatggagacatctgtaattttaaatttggaaaataaatatataatattaaaattcaaaaacaaaatcaaaaagtcagggggtttagtataacggcagtaccacggactccaaacccgttagtaaaggttcgaatcctttaaccctcgccatatgtaattgcactatgaaaaacaacaccaatccatttaattcacaaaactttcaaaatcaaaattcaaagtctacaaatagaaacacatctttttctaatccttttgcaaataaacaaaattttcaacaaggaaatacaacacaaaaatcagattcatctttaaattctgcttcagattccagatttaaaaatcaatctccatttaataattttaaacaaccaaatgaatcagaatttatagaaaattcaacacaaaatttaaataactttcaacaaccttctaagttttcagaacaaccttatggtggttctgataattttagatctaatccacaaaatcctcaattcccaaaccaaaatcacaacaatccaaacgcacaaaaacctaatcaatatggttttcctaatcaaaactataacggctataaccagacaaatccacaatttcctaaccgaaattacaacaatcctaacccacaaaatcaaccaattcctattcctcagaatcaacaatactcacaattttcaaatcctcaaaatccttcatttccaaaccaaaattacaagaatcctcaacaacaaaatcctcaattccctaaccaaaattacaacaatccaaacccacaaaatcaaccaatacctaatccacaaaatcaacaatatccacagtttccaaatcctcaaaatccttcattttctaaccaaaactataataatcctcaacaacaaaatcctcaatttccaaaccaaaattacaatccagcaaatcctaatcaatataatgtcccaaataacaacaactatcaaaaccatccattacagaattattctacaaatccacaatcaacaattgctccaactcaacagtacatcaataatcaacaaaatacttctaatactacacaaggtgatgttccaaaatatttttctgtaaagcaggaatcacaaaaatgacaaaaattcttgaaatttaaaccttcaaagaaaaaacaactcaaaaaagtggatttccaaaattccaatgcagaattttttaaaccttttttctcttccgagtctaattttatttacttagaaaaaggtttaggatataataaaatcaacaatatttcacttcataattttgctaaaactattttagctggattagaaacactatacgaagaagcactaagaaataatgaagtaagcattaaagaaattaaatttagagaaagacctattatttttgctcataatttaatttcacaaaaagatatttttaaaactttctacagaagttttaaacattataaattagagacactttgagtaaaaaagacaaatagacaagaaaatattgacaaagaaacactcaagtactgattagaaaaaaatatagtagatggtgctgaagataaaccaattttaattttttatttttacaatgatccacattcaaataaagtaattttagaaattagaaatagattcttttactttttagatcaagaattttatgaaacactgtctgaattatcacaacaattaatatttgaaagtaattacaaaaaattcgctaaactaaacaaaaaagattttgaaaaaaatgtattattagataatcagctagccaacttagtcgaagaagtaaaaaataaatactctttgaattctcagacagaaagcaaagtaaaaacacttttgaaaattaagctaaaagaaagtttttttgatatttttacaaaacttgactttaatatcaaaaagtcttcattttccttgttgttttcatgaatttttcttagttttagaaaaaaataccactttgtgatagatgcaataaacttagaagatgtcaagttttatcttcgtaataaatgaaaatatacacaattaagatcctgagatatctttttaatattattagatatttactcaaaaaaatctgtttttgctgctaccactaaccctagtgaaaattatgtacaaaacattttaaatataaacacacaattacctttacaaatttttgaaaactttaattttgaaaatgtaaatttttactattcacaagatgaaacattaataaataataatgaaaaagaaaatctaaatattagtttagatcaacaaattaattattcgccagaaataattgataatttttcttcaaatatctacatttttttacatttattagagtttattaataacaaaattgaacaagaaaaaattcattattcaaaaattttcaagtcctttttagcaaaaactcaaaatacacattattgagaatatagcgcatatactgtaaaagatcttcatcaattagaatctagaatttctagttttcgtcgaattaagtttatagataacattttagaacctaatcagtactttagtaattttttaattttcgactacaacaaaaatagttgagaaaataaattaattatttcttataataatgttaataagttgtgtaaaatttcttattgagtaagacaagccaacaaagaagataagaagtttttcaaaaaacttaaaaaaattattaaaagtaaaaaatagcaaaaaggaacaaaatgagcacaaaacaagttacaaaattcaaaaataaagaatatcaaacaaccaaagaattaataacagctggcacaactttaaaactaaaattaacagataaaactttcgagcctattgaaattgtagattttggtaaggatttaaaaggaaatgataaatataaattagcagttatatcagtgtttccttcaataaatacatcagtttgtgatgaacaaacaaaaggtattattgaattatcaaaaaaacatccaaatgtaagatttatttcagtatcagttgatttacctagcgccattggtcaatgattaggtatgaatggagcagataacattgaattttattcagatcacagacaaagaacatttggtgaaataggttttctcattgatgaaattttcttattaaatagaggatacttaattctagatacgcaaggaaaagttttaaaagttagtgcaaattctgatgtgcatcaacaaatagactttaacgaattagaagaagaaattcaaaaatataaaaaatagtgtataattttcttgtcatattttatatatgacattatgtaaatttctcaaacaaattagttcgatttttatcgaattaatttgttttttatttgtttttttataaatttgtgtaaaatatagtggcaattagaaattattgcagaaagaagattcactctcacctgatgaatacgtgttcataggtaaaggctacaaaatactaatttgttattattttttaataataatttttgttttgctgagaaagtggatttaccactttttttatttaatctcaaggaggaaaaattatttccaaaccaaatcctaaagccttttcacgttcaaaacctacacaagaacattgagttaacaaaaacattccatttgtaaaagtttttcttatcggatcagataacgaaaaaataggaataattgaaacaaaacaagcaattgaaatggcaaaagaacaaaaactagatgtagtagttctttctgttgacaactcaacaggtacaccaagacctattgccaaaattttagactacggaaaattcaagtacgaaagaaagaaaaaacaaaaagttgaaaaagaaaaacaatcttttaccaacaacagagaaattagactttcttttggaataaacataaacgacataaaaatcaaagcaaaaaaagctaaagaatttttactagacaatgacagagttaaagtagctctaagactaagagggcgtgaaaacacaagacctgaacaaggaaaattaattttaaattccttttttgatgaagtaaaatcaattgcaaaattaagtaaagaaatgcaattagctggtaattttataactttacacctcgaaagagataaaaagaaactacctaaatttacttcttcaaaacagataaaagaattaattgattttgaaaaaacattaaaggaagaagaaccaaataatgcctaaagcaaagacaaaatcagcactaaaaaagagaattaaagtaactgcttctggaaaaattaagcacaaacatgcatatcgttctcacttagcacaaaataaatctacaaaacaaaaaagacagtccagacacgcaacaacaatgtcatcttctgattacaaaagaataaaagacttaatttaatagatttattaataattttatttaatattaaaaggagattttaccaatgagagtaaaaggcggaactgtcacaagagctagaagaaaaaaatgattaaaattagctaaaggatactgaggacataaatccataggttacaaagttgctaaacaagcagttgttaaatcatgaacttatgcatttagagatagaaaacaagtaaaaagagattttcgtaaattatgaattagcagaattaacgctgcttcaagaccacttggtttaagttattcacaattaatcaacggacttaaaaaagctaatatagaaatcaacagaaaaatgctttcagaacttgcaattaatgaacctgaaacatttgctaaaatagtagaacaagtaaaaaacacaataaataaaggataataatatggcaagaaaagatgatatcacaggcaaaggtcctttaagtggaaataaccgttcacacgctttaaatgcaactaaaagaaaatttaacctaaacttacaaaaagttgtaatcgaagttaacggagtaaaacaaactttaaaagtaagtgcaaaaactaaaaaaacacttagaaaaaaaggtttaatttaatatttttatatttatataataatatgtcttaaaaaagcaaaatttgtttttgctttttttattttttttaaaaacagatttaattcataaattaaaataaaaaaaacataatatagtataattaaaccaatatagtaaaaactacaaaaggagcaaaatgaattttaaatacattaaaaaagaccatgtaatgcgttcttatgatgaacaagtaagatttttagacattgatggtaatttaattgacaaaaaagttgatactgaattaactaaagaacagctattagaagcttataaatgaatggttttatcacgtcaacaagatacttatatgactcaactacaaaaacaaggtagaatgctttcattcgcgccaaactttggagaagaggctttacaagtagctagtgcttttgcacttacaaaagacgactgatttgcaccagcttttagatcaaatgcaacaatgttagcattaggtgtgccaatcaaaaaccaattactatactgaaatggacaagaaagaggttcagttacaccagtaggtgttaacgttttaccagttaacattccaatagcaactcaatactcacatgctgctggaattgcttatgcagcaaaattacaaggtaaaaaaatcgttgctatgtcaatagtaggaaacggtggtacaggagaaggtgaattttacgaagctatgaatatagcaagtatttgacaatgaccagctgtatttactgtaaacaacaaccaatgagcaatttcaactccatttaaatatggatcaggatcaaaaactatttcacaaaaagcagaagctgtaggaatcccaggtgttatagtagatggaaacgacttgctagcttcatatgcagtaattaaagaagctgtagaatgagcacgtcaaggaaatggaccagttttagttgaatttttaacatgaagacaaggtgttcatacttcttcagataatccaagaatttatcgtacagaagaagaagaaaaagaacatgaaaaatgagaaccattccacagaatagaaaaatacttaaaagacaaaaactttattactgatgaagaaatcaagaaaatttgagaaacttctttagataaagttaaagcaacttatgaagaatcattaaaagaattagacactcaattagatgaaatctttgatcatacatatgcaacattaactcaagagttaaaagaacaaaaacaacaagctaaagaatactatgcaaaggaaggtaaataatttatgtcaacaaaagcattaaataatattggtgcagttactgatgcactagcattaatgatggaaaaagacccaactgttgttctttgaggagaagatgcaggatttgaaggtggagtttttagagcaactgaaggattacagaaaaaatttggaatctcacgtgtattcgacgctcctattgctgaagcaacaatcgctggaattggtgttggtgctgcactttatggtttaaaaccagtagttgaaatgcaattccaaggattctcatatccagcattccaacaaattatgacccacgctgctagatatagaaaccgtacaagaggtagatttactgttcctatggtagtaagaatgccaatggctggaggagttagagctctagaacaccactcagaagcaatcgaggctttatttgctcacgttccaggtctaaaagttgttatgccttcaacaccttatgatacaaaaggtttattaattgcagctattaacgacccagatccagttattttcttagaaccaaagaaaatttatcgttcatttaaacaagaagttccagaaggaatctacgaagttgaaatcggaaaagcaaatgttttagtagaaggttctgatttaacactagtaacatatggagctcaagtgcatgaagcattagcagctttaaaagaattaaatggtcaatactcagttgaaataattgacttaagaacaatttctcctttagatacagatacagttattaactctgttaaaaaaacaggaagacttttagttgttcacgaagctgttaaatcattttcagtttcagctgaaattattacaagagtaaatgaaaaagcatttgaattcttattagcacctccagcaagattaacaggatatgacatcacagttcctttagctagaggagaaggattccacgcaatcgacaacaaaaaaattcttaccaaaattaaagaagtaatgagcttcgaaggttaagaaatttaaggaatttaaaaatggaaaaaagatttgtaaccccactagcaaaagcgctagcggaaaaattaggtattaacattgatttagtaaaaggttcaggtccagcaggtagagttttaagagaagatgttcttgcattttctaaaaatccacaaccaacacaacctgcacctgctcaagtagcaacaccagcacctgcgccagctacacctgcgccagccgcaacagttgctacttcacaaggacttacagggaaagttgaaaaagttgcacctattagaaaagcaatcgcaaaagcaatgaaaacttcatgagcttcagttgcttatgttaacttagtaaacgaaatcgatgttactaacttatggaatttaagaaaaaaagtagttgatgatattcaaaaaacaacaggactaaaaattacttttttatccttcatttctaaagcaattttaatcgcattacaagagttcccaattctagctgctaaatacgatgaagctactgaatcacttgtttatccatctacaattaatttaggaatcgcagtagatacagaagcaggtttaatggttccagttattaaagatgcacaaaatttatcaatggtgcaaattggacaagaaatcaatcgtttagctaaagctgcaagagatagaaaaatcaaagcagctgaaatgtcaggtggttcatttacaattacaaactacggatcagtgggagcattatatggagttccagttatcaactacccagaaattgcaattgctggagttggagctattcaatctaatgttcgttgagtaaacggacaagcaactgaaggtaaagttatgcatcttacagtagcagctgatcaccgttgagtagatggtggaacaattggaagatttatttcaagagtaaaagaattgcttgaaaaaccagaaattttgggtataatataatttcacaataaataattaatcacattttcattttttaaactttgcaactttttggttgcaaagtttaaatatgttaaagaattaaaaaaaaacggagaaatatgtttaagttcaaattcgccgatataggtgagggtctacacgaaggagttgtaggcgaaatctttgtcaaagaaggagatatggtaaaagaaggagattcattattttcagttgaaactgataaaatggcttctgaaattccttctcctgcaactggtaaaattgttaaaatcttaatggcacaaggtgatactatccacgttggacaagaaattttccacattgatgatggaaaaggtgattctggagattcagctccagctgaagaaacaccagcacctgcaccagaagctcctaaaaaagaagaagcacaagaagaaggtggagcatcagttgttggtgaagttaaagtatctaacgaattatttgatttaagtgcatttgcaaaaccaaaaccagctacaactactgaagcaaaacctgaaagtgcattaagcagaagagcagcaatgcgtgaaaaagttttagcacaacaagcagaagcaaaatctaaaggcacaacatattcaggaacagttgatgaagaatttgatgtaatagtaatcggttcaggtcctggtggttatcttgctgcatctgaagcaggacaaaatggtctaaaaactttaattgttgaaaaagaattctgaggtggagtttgtttaaatgttggatgtattccaactaaagcaatgctaaaaagtgcagaagtattagaattagttaaccacgcttcagaatacggtgtaataggacacacagttccatttaaattaagctgagaaaaaatgcatgaacgtaaaagaggcgttgttgctaaactagtaggcggagttcaaggaatagtaagagctgcaaaagctaaatcagaaattggacaagcagaatttttagcaagtcatgtaattaaagtaaatggaaaagtttatcgtggtaaaaacttaattattgctaccggatcaactgatagaaaaattgacctaccaggttttgcacaagcttatgaatcaggtgaagtaattacatcaaaagaagcaatcaacttagaaaaacaaccaaaatctattactatagtaggtggtggagtaattggagttgaatttgcacaaatttttgccacagcaggaacaaaagttaccatcttacaaaatttacctttaattttagctaacttagatagcgaaatttcaaaacaagtaagtgctaatttagaaaaacttggtgtaaaaataattacaaatgctacaactcaaagatttgaaaatgacgaagtagtttattcagtagacggtaaagaagaaagaatcaaatcagatattactttagtttcagttggtagaattccaaatactcaaggactaaaagaagtaggtcttgaattaggtcaaagatcagaattagtaacagatgaattttgtaaaactaacgttgaaggtgtttacggaattggtgatgttagcggaaaatctatgttagctcatgtggcttatagacacgctgttgtagctgttgctaatattgttggtaaaaaagaaagatactcagacaaaactgttccagcatgtatttatacacacccagaaattgcttcaattggtttaacagaagaacaagctaaagcaaaaggtattgactttattgttggaaaagcttcatacggacacattggaaaagctattgccacaaacgaaacacaaggttttgcaaaattattagttgacaaagaatttggagaaatcattggtgttcatgttttaggagcagttgcaacagatattattagtgaattagtagtagctgttgatttagaaacaactgtttacgaaatcgctgatgcaattcacccacatcctacttattcagaaatagtttgagaagctgctagaaatgcagttgctaaattaaacaaacttaaaaaataatcatttaactacaattatttaaaaaaaccggaatttattccggtttttttaaaatataattaagaattataaatcatattttagtcgttttttagcaaattcagcttctgtaattcctaatttgttagcatttgaaatgttgtagaatttttgaattaaaataaatcctgaacatatcatagaaacaccgttagctgcagtaaccgctgcttggaaagcaatatcactacctaaatctgcatattttttacagaaataaactcctgaaacaaagaaaaataaagcagctaaaaataaaataataaataaaattttgtttaagtgatgagttcttttaaatcttgcaatattaataacttcaggtatggaaaaaacagctacaccaattgctcctccataagaaagtacttgcataaaaatatctaatccgtccattttactcctttaataaatttaaaactttttaatgatttttgatagatttgaataattaagtttgtattatataaaattttttaaaaaaagcaaaaaaaaattattaaattctttccaaacagattaaagtttcaatatgaaaagtttttacaaacatattaaaaatttgcataaaactaattttgtaattgttttttaataaagaaaaatcataggcttgagttgctggattgcaagataaataaataattttcttaggttttaatctcaaaatttcttctactacttttttgcccatcccttctcttgcagggtctacaataatagtatcaattttttcattaaaatccttcaaaaacaaggacacttcttgattattaaaagatatattttcaattttattttgttttttattaaataaagcgtcaatatgagcaaacttattttgctctacagcaataacttttttagctttttgagccaccaataatgaaattgtcccaatcccactataaagatctaagacaatatcatttgtatctactaaatttataatttctaaatatgctttttcagctacttctttattaatttgataaaaagaattaatgtttattctaaacattaaacctaataaattatctgtattaaataattcaacatctttttttgttccaacaactaatttatctaattttcttaaaattaccttcccttttaaattagtttttggttttatatcagtaagtaaaaagtcatttaaaaaaatcttcttatgagaagctttttgatacaaagcaccatcaaataaagtaattttatttctatatctaaattcttttttaccttgaaaataatttaattctagttctttattaacatcgaattttgctatgtttttatagtcatttttaacaacatattttttatattcagcttcagcttctagattcatatgaataagctcataaccaccaattagttcataattaagtggcaaatcgtaattacgatttgggctagcttcaattattttagttacttttcctttatagtaatttttaaactctgctagaatttcgaattcaacaacctcgtttaaaattacaaaatctagataaataattttattattataataaccagcaccctgacctttttggttataaaagataattttagtttgttttaatatcattaaatttctcaacttttacaaattttttaaacgaaaatgcttcttttttctttgcaagtcatcattgtgatacagtagaggtagctgttgctgttgccaaaattaaagatttttcaacattattagtttttaaaaaattcgctataaaaatagagcctagtgtatctcctgcgcctactgtagattttatatttaccttgatatttaaagtacttttataaaaaattcctttattatcaagcaaaatcgaacctcgatcacctaaagataaaagtatattgttagcacccttttgttgaatgtatttaagtgtatcaaaaatatctttttttgaattaattttaaaatttatgtttaattcatctaaattaggcttataaaaataaggtttaaaatcaataaatttcataatatttttagtatcaatatccagaccgaatttaactttttgtttgtttaaaatctctaaaatttcaactaataaattttcttctacaacacctaaaatataaacaaaatccttatcagttaatttttgcaacagcttaaataatttatttttttgtgcctcattaatttgatttcttggtccatttagctcaaaaaaatctgaagttttactaaacattttaacattatatcttgtaggcaaaacaccagcatttgtaatgtttaaaatatttaattgttctttttttcaaaagctattcaagttattaaatgtgtgtttatcaaagaatgttatggcagtgttttcaaatcccatcctacttagaactacagaagcatttattcctttaccaccaggaaaaagattaaaatttttatatctatttaaagagtttatttcgaagacttcagtctgtattactaaatcaacagaaggagaaaaagttatagttaaaaacattgttattaaataatactaaaatttaaaaaaattttataatttatacatttagccaaggagattcgatgcccaaattagtttttttgaaaccttattttaaagaagttttatgagcaaatgataatttaaaaaaactttacaatttatcatactcagcaggcgaagcttgattaatttctgcttttgaaaaaactccaagtttgataataaatgaagaaataaaagagaaaaatttatacttgttctttaaaaacaataaagatttttttggaaattattcaggtgattatcctaatttaactaagtttattgatgcaaaaacagctttaagcattcaagtgcatccagatgacaaaaacgctcgaaaattacacaacagttttggaaaagatgaatgttggtatgtattaaaaccttcatctaaaccttttgtaataggaaccaacgaaccttcaaaaacaaagataaaacaacaaattcaaagcaaaaattttgattttttaaacttagttcatttgcaatctaatgattttacatacataaaatctggaatgctacatggaattcctgctgatacatttgtttttgaacttcagcaatcttcagatataacttatagattttatgattatgaaagaagagataaaaacaatcaattaagagaattacatttagatttggcttttaagtctttaaaaactaagctaaaacctaaaattatcaaaaacaaacaacttcttgttaacaataaatatttttatttagaaaaagaagaaatcaatggcaaaaaaataaaatattttaaaaaagatttttattgagtagaggcaacagtaattgaaggacaaggaaaagtagataattttgaggtaaaatttggtgacgtctttttaataaaaaatcaaacaaaatccttgatttttgaaggtaaaatgaaaattttacttaactttatcataaagtaaaatgcccaaaattactaaaatatggtaaaataataagactatgacttcaaatgaaaaatatataaattatttggttaattgaattaaaaaccaagttaaaaaagctaataagtcaggtgttatagtagggatttcaggtggaatagattcagctttagtagcagttctagcaaaaaaagcatttccaaaagattctttaggtttaattatgcaaatcaaaaatatggataaagatttgtcgcatatagaaaagttagtaaataaatttgatatatcaacaagaaaaattaatttatctaacatatatgaagaatttgttaaaacattgaaaattgaagataaaatgtcattagcaaacattcaaccaagattaagaatgtcaactttatatgcaattgcacaagaaaaagactatttagttcttggaacagataatttagtagagatgtatattggatactttacaaaatacggtgatggaggagtagatcttcttcccatcgttcatttaactaaaaccgaagtttatcaattagcaaaagaattaggaataaacgaagaaattttaaaaaaagctccatctgctggtttatgagaaaatcaaaaagatgaagacgaaatgaaattcacatacaaagactttgatcaatttttagaagataaatcaaaattaaaaaaatcagttgttgacagaatcgagtatttacataaaatcagtcaacataaaagaaataaaataccaagaccaagaaaaacattaaaggatttttaatatggcaggacattccaagtgagcaaatattaagcatagaaaaggtgcacaagatgcgctaagatcaaaaattttcgctaaattttcaaaagaaataatggtggctgcttccaaaggtggacccgatttaaactctaattcagcacttagattagttgtggcaaaagcaaaagcaaaatcaatgccaaaagcaaatattgataaagcaattgctaaagctacaggcgctggtcaagaaggagcgaatttcaaagaatttttttattcaggaaatttacctcacggagtttcagtaattgttgaaatcttaacagataatgtaaacagagcaatttctaatttacaagcattatttaaaagagctaacggtcaaattggaaaacaaaattcaattccctatatgtttgaacaaaaagggtatattgaaatagctaaaaaagacctttcagaagatgaacttatgctttttgttttagataatggagcaacagattttcttgttgattcagagtcttatgaagtattttgtgaaccttcttcattaacttcactaaaagcagctcttgaatcagaatacaaagatatagaattcttaagtgtagaagttaattactttccaaatgaaaaagtagaattaactgaaaaagacacagaagatcttttaaataaaatcgacacttttttagacgatgatgatattcaaaatgtttttcacaatattaaattagattaaataaaaggcagttaaactgccttttattgtgattagtaaacgaaataaataggtgttttacttgctgaacttttagcttcagaattatctcattttatggtattttcttttgtttttaattcccctgaatgagatgttgctcctttaaacatcccaactaggttcattaaagtattaataactgatggtaaagcagtaagtgtagcagtagcaactgcaccaattccagcacctgaaatattatacttttcttcttctgttaatttaactagtttgctattcatttacctcctttcagacttatttttcttgaaattgcaaaaaactttaaaaaaaggaaaaaattaggaaattatgaacaaaaaaaacatcactaaacaagatgtaatcgatattttaaataatgaaaatttttataaaaataatattttagatttaaaaagtctagatcaagtagaagaaattgaaagctttgctttttcaggcattaaaaaaaatcttcacaaagtaattttgcctccaaatctaaaaagaattggacaatctgcttttatgtacaataaaataaagcaaattgtctgaaacgataaaatagaacacatttcttttgcttgttttgaaagtaattatttggaagtacttcaaattccttctagtataaaggttattgaagaatcagcatttgctatgaatagcattaaaacccttcatattcctagtttcttaacaactttagaaaatgatttattttacaacaacaaaattgaagaattaataatcgaagactttaaaaataaagaaattaaaaatgctttttttaataacgataatataaaaaatattgttttaaaatctaactttcggttattagaagatacaaacaaatatgattataaaaaaatgatattttactttttagatcacttttctgactatgaaaatgaagtaaaaatgacagttgataatttaaaactatctaattttttaaaatcacttgttatagataatgttcaaaaacttactattgaaaacaataattctaaatctgttgaagttttagagttttatgttgaaaaaatggacctagatactaaattagaatttaaattaatttctaaaaaagacttaaaaactagcttaaaaatagtataaaattactaaaaacatattataatttgtaagaatttttaaacaaaatttaatttatatataaaaaggtaattaaatgaaagattttattgaaaaaagaacaaaaataatcgcaacaattggtccttcaactcaggattataatttattaaaaagattaattcaagcaggagttaccacaataagagctaatttttctcatggtgattatgaagaacaaaaagcaaaatttgataatgcaaagaaaatttcaaaagatttaaatattccagtttcaattttgttagatacaaaaggacctgaaattagagttggaaaaatgactaatggttcacaattaattgaatcaaattctaaagttgttattttaacttcaaaagaagattacgaaaactttttaggaacttcagatgtagttacagtttcctatgaaatggatcgtgatttaaaaattggagatcaagttttatttgatgatggtaaattacaatcaacagttatagaaattgaaccaaataaaattactgttttaacaaaaaatgctcacgttttaaaatctaataaaagaattaatctacctggtgtagaattttcacttccatttttatcagaaaaagataaaagagatgttattttcggaatagaacaaggcgtaaattacattgctgcttcatttgttaattcagcggaaaatgttagagaattaagacaattattagatgaaaatggcggagagcatatccaaataatttctaaaattgaatctcatgttgggattgtaaaaattgatgagattattgaagtttcagacggaattatgatagctcgtggagatcttggattagaagttccttattatgacgtaccattccatcaaaaaaatattattagaaaatgtagattcgcaggaaaaactgtaatagttgcaacacaaatgttagattctatggaaaaatctgcacaacctacaagagcagaagtaaccgacgtttattgagcaactgagcttggagcagatgcaacaatgctttcaggagaatcagcacaaggtcaattcccttatgaatcagtaaaagttatggcaactattaacaaaagagctgaaagagagttttataacaagttattttataaaaaacaactttcagttatggcaaaaaattcatttggaaaaagagcttacatagctcacaaaatagcacattatactttagaacacgatgttaaatttgcagtggttttatcaagaacaggtcaattactatcaacaatagctaaatttagaccaaatactgcagttatcggaattatcaatgatgaaaaattaatcggtggttttggagtaacttcttcagtatttgtagctagtgaatcacttgaattatttaacgaaattaaagctgactttgctcatgcaagaagagttttaagcacatatggagctgagccaggtgataaatttttagtggtagaaaacgacaaaatagttgaatttactttctaagataacaacaataataaaaactagaagaaattttcttctagtttttatttactttttttaaaaaaacgaagctaagtgtttttacttagcttcgttaaattggttatttacaagtttattttgttcagtgtttagttttaaattctagaataaaatgctttatttttctatataaatattttattttatttctaattttcaatgaatggtatttaattttaaacacttttattcaaaaccaactaactaaaaacggaactatagcaattgataataaagtaattaaatttaatattataactatagtgtttgaattacctgagtagaaaaaaggatgatagaaatttaaaaatggataaattgtcaatcctgtataaaaataaacaattttattttcattactaaaatcagggttagtatattgccttacgctaaaaaagaacaataaacaacaaaataggtaataacaaaacgaatatagtattggataaataaaagtatattttttaatagcatatgcacgttttaaatgataaagacagataaaagataatattggattaactaaatggactatcaatgtctgtaaagtatctaaaagattttctttgaaattaaaatgtcaagctattaaagttcaaaacactataaatgtgatagttagtaaaacaattgaagaaaatagccattgaaatttttttctgcttggatttagaacataaattaaaagtgcaattgcaaaaataatattagtttgataagtaaaataaaataaactagaaatattctgaaaataataaacgaatgaaacaaaataaaatttgggtaaagaaaattcaatataatttactgctatatttcttgcaattattacaaaagtagaaataattgcaaataaagcaaaaacaaaattgattctttgttctttttttcactcaattcaaaattttggcttcaaaaatgaaggattttgtctttgatttgaagatgagtctaaattattttgttgatttttttgagcatttgccataaaaagtatttttaattaatattaatcttcgtcagctttaattgctctttcttttactatttgatctgaaatttgttttggtgtaatttcgtagtgatcaaattgcatttggtaagttccacgacctgatgtcatagatcttaattgtgttgagtatccaaacatttctgctaaaggaacatttgctctaatggtgttagctccatcggatcttgtttcttgttctttaacttgtccacgacgacgagataagtcacccataacatctcctgagtattcagctggaacaaaaacagaaacatccataataggttctaataaaacagttccaattgcatcttttgcttttgtaagtgctttagaagctgctattttataagccatttcagaggagtcaacttcgtggtaagaaccatcataaagtgttgcttggacgtcgatcattggataacctgcaagaattcccatttgcattttttcttcaagtcctttttggattgatttaatgtattctttaggaattttaccaccaacaattttgtcaatgaacttaaatccaccttcttcatttggttcgaatttaattcaaacatgtccatattgtccacgtccaccagattgtttgatgtgttttccttcaacttctgctgctttagtaatagtttcacggtagctaacttgtggttttccaactttagcttctacaccaaattctctttttaaacgatcaacgatgatgtctaagtgaagctcacccatacctgcgataattgtttgtcctgtttcattatctgttcaggttttgaaggtaggatcttcatttgctagtttttgaagaccgattgagagtttttctacagcagcttttgtcgcaggttctaaagcttgagaaataacaggttctgggaaaaccattttttctaaaacaaaaggttttgctttttcagaaattaaagtatctccagttgttgtttcttttagaccaactaaagctccaatatctccggttctaacctcgttaatttcttctctagagttagcatgcatttctagaattctaccaactctttcttttttatttttagttgagtttaagatatatgttcctttacttaaaactcctgagtacactctaaaaaatgttaatgaaccaacaaatgggtcattcataattttaaaagctagagctgaaaattcttcatcatctgaagcttgtacagaaaattcttcatcatctgagtatgctttaattgctggaacatctaaaggtgaaggtagatactcgataacagcgtcgatcatttttttaacacctttgtttttgaaactagttccacaaacagctggaaagaattgacctgaaatagtagcttttctaattgcatgttttaattgttctacagttggagtatttccttcaagtaataaatgcattaaatcttcgtcaaaatcagcaactgcttctgctaattccatacgcatcatttctgctttttcctttaattctgaaggaatttcgatttcaaattcttcttcttctttttctccgttgtatttaaaagctttcatttctactaagtcaattaaaccaataaaatcattttcagatccaatgtttaattgaatagcaacagcgtttccacctaatttatctctaacagattttactgaagcttcaaaatttgctccagctttatccattttattaacataaactattctaggaacgttgtagtttgtagcttgtcttcaaacagtttcagtttgaggttctactccagattgagcatctaaaacagctacagcaccgtctaaaacacgtaatgaacgttcaacctcaacagtaaagtcaacgtgtcccggagtatcaataatattaattctttttccttttcaaaaggctgttgtagcggctgaagttatagtaattccacgttctttttcttgctccattcagtccatttgtgaaccaccatcgtgtgtttctccaattttatgaattttacctgtatggaataagattctttcagttgtagttgttttcccggcatcaatatgagccataattcctatatttctatagtcttttaagtcaaattttcttgccataattatcacctgtagtgagcaaatgctctattagcttctgccattttatgtgtatcgtcttttttcttaactgatccaccagttttgttgaaagcatcgataatttcgtttgctaatcttaattccatagttttttcattacgtaatctagcatagttgattaatcaacgtaatgatagtgtttgttttcttcttttagaaacttcaactggaacttggtagtttgaaccaccaactcttcttgaacgtacttctaattcaggtgttatgtttttaatagcttcgtgaaatacttctaaagcgtcttttcctgttttttcagcaactattttaaaagctgaatataaaatgttttgtgctgtagattttttaccatctaacataattgtgttgatagctttagtaattaattttgaattaaatactggatctgctagcacttgtcttataggggcttgttttctacgtgacataatttctccttttgtttattgattattttttctcttttggttttttagcaccgtattttgaacgaccttgatttcttttagctacaccagctgtatcttgagttccacgaacaatgtggtatctcatacctggtaaatctttaacttttccacctctaattaaaacaacagagtgttcttgcaagttgtgtccttcacctggaatataagcatttacttccattccatttgataattttacccttgcgtattttctaagagctgagttaggttttttaggagtcattgttcctacccttgtacatacacctcttttaaaaggtgcaggtaatgcatgctcttttttctttaatgagttaaaagatttgtttaatgcaggagcgttaatttttcttactttattaactctcgccccattaactaactgagattgtgttggcattttttatcctttctttaattttgttaaataccataaattgatataaagttttaaaattatacaacaacttagtccagagtatcaaaaaaagttcacttttttattaaaacccttctttttagaaggatttttgtatgttatctgtgataaaaataatttaaaaaatataaaaaaataggaaattaagcttcaaaagttcactaatagtttgaacaaaaaaagcagaatttacactctgctttttttctaatttatactattttaattcgtcttttagcatttcttttgctttgcttaattcaactgagaatattgaagttacaccacgtttttgcattgttactccaagtagctgatcaactctagacatagtaccagaacggtgagtaataatcaagaattgagtgttttcttttaataattttaaaaactctacataacgaataacgtttgattcatctaatgcagcttcaacctcgtctaagatacacaatggaattggccttgcttttaagatagcaaaaagaagcgaaattgctataattgctttttctccacctgagaaaagacgtaagtttttaatagtttttccaggaggttgtgctgaaatttcaacacctgaatttaatacatcatttttatctgtaaagtgaatttctgcttttcctccaccaaacattttttgaaataccatattaaattcgttatttactaagttaacaacttcagtagttttattaataataattttatctaaatcagaaattgcttcttcaattttggactttgcagtagaaagttcttcaatgtgttcttttttctcttgataacgttggttaacttcttcaaattcttgaatagattctaaattaacacttccaagttcttttagttcttttttaagattatctacaaaatgtcttgcttcttcaatgtctaaatctaaagaatattgttggctagcagcttctaatgttagcctgtagtgctcagataatctcttttgattttgttctactaaaaatcttgctctatcttgttcagtaatactacttgagtgttgtgtatttaattttcttaatctagaatctaattcttgttttttagactcttcttttccaatttctgtaataagatttgttaaacgatcttttttagcattaagttcaatgtttaaagtagaaatttctttttctaagtttaatttttcagaatcaaaacttaaatttaagctttcttgatcctcttgctgttctttaaaaatttcacttgctgttaattttaaattatttagttcattgtttaaactatcaagtttggtgctaatagaatttgcttcaatttttacttgttgaatagttgaattagcttcttgaatttcgttgtttttagcgctttgttttgtttttaaatcaaggatttggtcttcagcgaattttaaattattagtaagttccttaattttaatttcgtagttcaatatagaagtagactcttgctttgttccaccggtaattgttccaccaggtctaaacaaatcaccttctaaagtaacaattgtgtatttttgatcaagtattttagctattctgtttgcattatcgacattatcaacaacaataatgtttcctaataaaaagccaaaaagtttattaaattgattatcaaattccactaaatctttacctatacctaaaaagcttttttgaccttttaaaacaagtaaatgatcttctcttacttctctttctctaatagaacttaacggaataaatgttgcttttccagataaatttttctttaaaaaattaatagcttcaagcgcatcttcagatgtttttacaactatttgatttaaagctgctcctaaaacagtttcaatggcaattgcaaattcttgattaactttaaaaagttcagaagtaagacctaaatatccttcaaataagaaggaattatctttaatcgctttaattcctttagataaaaaatttctattttcgaattgttgttttaaaaagttaatttgagtagaagcagaagattttttctcgataaatactccaatttcttttgaaatatcagtttcttgagatcttagtgtgtttaattttgcatttaaagcagtaagttgtctatcaagttcaacttctctttcttttgaagcatttatttgtatttttaaagattcgacttgttttttaatttcttcgattttagttttttggtcaactacaatttcaccactaataattaattttctacgcgcttcgatttcggcttcttgaacattaattttgtttaatttatcttttaagttttcaattttggaaccaatttgttgaattgtttgttctacttctgttttaaatccaacattttgtgtaatggttgattcatgagtttgaatattgatttctagttcgtttctttcttgttcaacttcagctagtgatgtgctcaaagtgtttaatttatctgtaaaaaagtttaaatcattaacaattaaacccacttcgactgattcaagagctttacttttttctatataaattttagcttttgacgattgtttttctaaagaatttacttgtctttcaagttctttgatagctccttggagcttgtcgattgcgtctgtagttctaattaattttttttgtgcttcttctttgtctaatttatatttagaagttcctgctgcttcttcgataactgcttttctttgttctggtgtagcttcagcgatttctgaaattgtaccttgtgaaataatagcaagtgaagatttagaaattccagattcaactgctaagtttttaatatctttgtatctaactggttgatcgttgtaaaaatattcgttagatccttgtcctctttttagtacacgagaaatggtaaaaatttgttcagtttcttctaccgcgtcttcatttttgaaggttaatttaaccattgctttatcttgtggtttaacggttttagaacctgcaaaaataacatcgtccatatttaaaccacgaagttgttttgcagattgttctcctaatactcaacgaattgcatcattaatattagattttcctgaaccatttggtcctacaatacccactactgaaccatcaaaattaatgctaataggatcagcaaatgacttaaaaccttcgatttcaattttaataagctttaacataatattccttgtttttgtagaatttaaattaaattttaaagtaaaacaacttattaaaaaagaattattttatttttttatattaaattcttttttaagttttctaagagatttttttgcagcttctaattcagcttctttaatgctatttcccttaccatagccataaattttgttatctcaaatcaattcgctttcaaaaacattatcgactttttttgtgttgtacttgatagaagtttttgaaaatgattgaataatttcttgaaactctgattttggatctttacttactttctttgagtgtttttttactaaagaatgaaggattttttttacaaaattttcaaaagtttttttgtcttggtctaaatagatagcagcggttaaagattctagaatatcagcttttattttagtgttatttaaaatctcttcagaaccttttgctacttttaaatatttactcaattgcaatttgtcagaaattttcgcaaaagaaacagaactaattatttgtgatcttaaaattgttgcatttccttcgtttttggcatcaatgttttgaaaaatatacaaagaggtttgcaaattcaacaaagaatcacctaaaaattcaagcatttcatagtgtggtttatttggtcgcacatgatgataagatttatgtgtaaatgcttgttcaaaaatactaatatcattaggaactatgtctaaatttaataataattctttaatacttgccataaactttactctattattgcttcttttaacttgctaaacacattagattctactgcgagttttatttgctctaaagcaccttcaaaagcttttttatctgaagaaccatgagcttttaaaacaattccattaagaccaattattcaagctgctccaacatttctgtagtcaaatctttctttaatttcagaaaatgctggttttaaaagtaaagaacctaattgtcttgttgctgtttttgtaaattcttgtttgagcaatttaacaaaatttaacactgtgccttccattgtttttaacactaaatttccagcataaccatcacttaaaactatgtcaatacttccgtttaaaatattttttgtttcaataaatcctttataattcaagtctttttccaattttagaagaatatttgcttctctgtgaaaatcaaaacctttgtaatcttcagttccaatatttactagcccaatagcaggatttttgactttaaaaagtgtttgataaaacacttttgctagtttagctcattgaagaaaatattcaggttttacttcaatattagcgccaacatcaagcatcaagaaggatttatctttttctagtgtaggaatcattggcataaaagctggacgtgatacacttgcaagtcttttaagttttaacatcgaactagctagaagtagagatgattcaccagctgataaaacagcatctacttcattattagctaataaatttaacgctgtattcattgaattttcttcttttgctatatcttttgaaagtttttctttttttagtgcaatgttaggttcttgtaaaacaatgatattttcaggtttattttttggcatagcagagtttattttgtttgcatctcctactagtcaaattttgattgttggatttttttgagcaaaataaaaagctgcttcagtagcagcaactaatgaattgtcactgttttgaacatcaaatgcaatgctgtatttcattaaaccaccccaattaaaaagttaaatattttttgttgaccatttttaattacaatttctaaatcataattttgttctaagtaattttgaatttctaaagcttcagattctgttgctaaatcaccataataaatataaatcatctcagaatcttgagtaattaaagattcgatagtgtctataatgacgtcatatgcacttgctttagcttttaataatttgttgttttccatagcaacaaactgatctttttttacttttacgttattaattttagcatctttgctagcttgaaaaacttccaaaacacgtaaagttcctaaagattcttcaattagttctttattatcttgccatttagtatctttgttgaaatttaaagaagcttcaattccttgtacttgattttttgtaggaattacaataacttttttgttagttacaatttttgcagcttgttgagccgctaaaataatgttggaattattcggaagaacaaaaacagatttagcatttacagaatttattgcagtgacaatatcttgtgtggaaggattatcagtttgaccaccttcgatgataaaatctgttccattttgcttcattagagaaataattccttgtccattattgcaagaaactagcccggataatgaaggatttgagttttcagaattagtagaattgtcactttcagtagttgaattttgattggattgaagtgtcatattttctgattttatcttgacaaattcaccatatttttgtaaataattcaacatagatcctggttttaaagtgtgaccatgaatttttaaataaccttcttgttctacaataactatagattttacgtgcttttctaagtcattaattattttatttttattaaatttatttggattttttaaatcaacaatacactctgtacaataaccaaattcttcctctttgttgtgttctaaattaaagataaggtctttttctttttcttctatttttagtctttgtattggtatgccagaaaaaaatgaattaaatccttcaaaaatcaacaaaattccttcagaacctgaatcagttacaccagattcttttaaaatttttaatagattagggctattaatagttgttttttttccttgttctacaactaacttaaagcagtcttcgatagagtttgattcagttatattttctttaagagcttgtgcaacttcacgaatgaatgttaaaattgtcccttcaacaggttttagcacagattgataagcttttttttgtgcattttcaaaagcctttactaaatcgataacatttgcttcttttttggtttctaaaatttcgctcaaacctctaaaaatttgtgaaagaataactcctgaattacctcttgctccaaataacatagcttttgaagtttcttttacaacatcagataaagtaacagaatccatgtttttaatagcctcatatgcagaatttatagttgctaacatattagaaccagtatctccatctggcacaggaaaaacatttaaagaattaattttttcaacattatttgctaaattattaactccagattcaagcgcaaatttaaacatttgagcatttaaagtcttggtattcattacattactcctctgatttgtatatttaagtttctcaaatcctcattacgttcttttaaaaaaaatttaatttgagttcttaatccttctatcaagatttttgcattaacacctacactaataaaaatggaaaaagaaatatctgttttttgatttttttcttcgattttaatgatagattcagaaaataataaagatttatttattttagaaaaagtagaatcttctatcaatccaaaagctacgattccaggtgtttgagaaattaattcaaatagttcttgtttgatgttatctttcataaaatcctttatttttatacatttttgttagaattttcttctttaaaatcatcaattattaagtttgcaaaagttataatgtgaggtacattagaatgataatgtccaaagctagcttttattttaacttgttgtttttgatcatcgaattctatttttcagtcttgatatgaaattctttgctgcaaagctttatcaagagcatctaatttttttcaaggcaattcataattagcgattttttttacaacaattttatgttctttttcaattaaatagtttactaaaattaattttatatattgaggatcaactgtgtttaaaaattgattatcttcaattttagcattgggatttgccaaatgtaatgcgtcattgacttctaatgcttctttaagtttagcaaaaaataattctttaaactctttgtaagttattttttgttcaactacaaatttaaattgtcttgaaatttctacagaaggagaaggattatttggatcaaattgaccaatttgaagtttgtaatcaatatctccgttatttggatcttgagttttggcaccattatttggatctttagttttatcaccgatatttggatcttgagttttattactatttaaatcttcactttgacaagaagctaaaaaatatatcggaatagttaaaaaactagtaaaaataaagaatttattaagtatttttttcataaatattttttctacatatatttatcttttaattttaaaagtatttagaattttaccacattataaaaatataaatttaacttttaagttgaattattctattttaatatataattataaaaaattaaccatattagaaaggttgtgttttgcaaccttttcttattttactaggataataaaagattaataaggagcaatttgactttagaaacttcaatagttgaaaattttgaaaatgttgtttcagctaaatttgaaattgaaaacaacataaaatttttaagagtacaaacaaatctaaaggatttaaaagaaatcgaaaatctcacaagacaaatttcagattttattgataaacataatttagaggatgaaacatcattttatttagatgtagtatcagtaggaacagatgcagatataaactttgacgatttgcaaaatcacattaatgaatacattcaagtttgattatctaaagaagactttgttttgggatatttattagacaaaagtaaagatattattactttagaaattaacataaaaggaagaaaaaagaagcaaattttaacattacaacaaattgaaaaaataaattcatacataaaaataaagaaaaataaataaggaagatatgacaagtaaaagaacaaaaaaagaacaagtttcaacaataaaaaaatttaattttcaagaaatacttcaagacatttctgaatttagaaaaatagattttaaaataataaaagatatattacaagattctatttcaagacaaattatttcaaaactagatccagatgcagagattgaattgttaatagatgaaaaaaatcctcaagagtttagtgtaatcaacaaaaatggagttattgtttctgatcaagaatttgaagacatgttaaatgaatcttctgatttagctatatctgataattcagataaacacacttcatttcaagcagaaaaaattgcttttattcctttatctatagctacaaaaattaataaaaaagcaaatgttggagatgtttttgatattcctattgatatttcagaatttgataaacatatttttgttcctattattcaaacttttaaacaaaaaattcatgagtttacaagaaaactggtttaccaaaaatttttaccattaaaaaacaccattataaaagctactttaattaaaaaatcacaaaatggatttaactttttaattgaaggtgaaattccagcatatatgccaaaaccaaatatttctaactttaatattgctctaaattctgaacaagaagtttttattgaagatgttttagataatcaaaaagattcacaaattatattatcttcaaaagaaggaatgattttaaaagaaaaattaaaaagagaaattcctgaagttgaagcaggtattttagaaattgtaaatgtagcaagagaagcaggaaatagatcaaaagtttcagtcagaaaagtcaatgaagatgacttatcacaaggtgttgatgaaataggtgctttaattggaaaaaatggaagtagaattgcaacaataaataaagaaatgcttggagaaaagatagatattgttaaatatgatccaaatataacaagatatatcataaatgctttatcaccttcaagagtaatttttattgaagaaatcaaaaaatctaaaggtcaaaaatttttagtagttgttcccacttctcaccaagcaaaagctataggaaagcatgcaattaatgtaagacttgcaaatgaattaacacgtaccaaaattgatgtaaaatcctataaagactatataaatgaaggtaaaacaataactaattgaaatggtaatatagaaaatcaagctgaattagaacgtattgaaaaagcaagtttagtttcacacaaaacccatcatcacaagcctcatacatatactagaagatcattttcaaatacaaatataatggctgaatttgaaaaagatattgaaaaatatatagaagatttacaaagcgaaagacttttatatgaagagtcagaaagtgaagaaaatgaagacttttcagttatagaacaaccaaaaccagcagtaaaaacaaagaaaaacaaagacaaatttgatgttgataatctcctagatcaagcaaatgaagaatttgaaaaagtttctgagactgctcaagaacaaccaaaagaagaacctaaaaaacaagtagatttaacaaaagaagaaatcaaacaaatcaaaaaagaagcaaaattcttcaaaaaagacaatgatttattatcatacagtggaattaaagaccttgatttaggtgaatttaattgagatgaggacgaagaggaatagttttgaaaatttacaaaagaagatgcataattgcaagagagcaattcccagttaatgaactaattcgttttgtaatgactcaaaataaagaaatcaaaatagattttttaaattctaaaacaagaatacatggtcgtggggcatatgtagaaaataaagaagataaaattcgtcaagttttagataaaaaacttttaaacagagcttttaaaaccaacatagataaagcagtttatcaacaattaagtgcagaaatggagctagaatggcaaaaaaagaaaaaagaaaatcaaatataaatgaaatcaaatcacaattaaataatgttaaagtagaagtacaatctggagtttttacttttacaggagcaatgctaatttcagaatttgcacaaaaaattaataaaccagcaactgaaatcattacatattttttcaagcaaggaaaaatgtataatctaaatcacattataaatgaagaagaaatagcagaaatttgtttagaatatggtctagattttcaaaaagaaaaagaaattaatgcttcaaattttatggatgaagtttcaattgtagatagtgaagctgaactacaaactagacccccaattatcacaattatgggacatgttgatcacggaaaaacaacacttttagattatattagaaagtcaaaaataactgattcagaatttggaggaatcactcaacatactggtgcttatcaagttgaatacaataaaaatttaatcaactttattgacacaccaggtcatgaagcttttactcaaatgagagcacgtggagccaaagttactgatattgttatcttagttgttgcagctgatgatggagttatgccacaaacaaaagaagctattcaccatgcacaagctgctgatgttccaataatagtttttgttaataaaatggacaaaccaaacaaagacgtagacagaattaaaaacgaattagtaaatttaaatattattcctgatgaatgaggtggaaaaaatatttttgtttatggttcaggaaaaacaggacaaggagttgatgatctttttgaagctattttagttcagtcagaagttttagatttaaaagcaaataaaaataggtttccaataggtacagtaattgaagctaaattgcatcacggaaaaggaacggttgcaactttaatagtacaaaatggaactttaaaattaagagattttattgtggctggttcacaatatggaaaaattagaactttagaagatacaaatggacatcaaattgagcaagctcaacctggaacacctgttattattactggtttaaattatgttcctcaagcaggtgataagttctttggatttccagaagaaaaatttgctaaacagttagcagaagaaagaaaattccttcaaaaacaaagcaaattaattcaaaaaaatagtctttcaaaagaagaaaacaaagataaagttattaacttaattataaaagcagatgttcagggtatagctgaggcaattcaatctgtagttgaaaaaatgtctacaaaagaagttcatgtaaatgtattgcattcagcagttggtttaattagtaaatcagatattttattggctcaaacctctaatgctaaaattttcgcttttaacattcaagttccaaatcaaataaaacaagaagcaaagcaagcagaaattacaattagtgaacatacaattatttataaaattattgaagaactaaaagcacaaataaaaggtttaagaactattcaatatgaagaagtagaaactggatatgcagaaattattagaattttctgatactcaaaagtaggaagtattgctggatgttcaatgaaggaaggaaaaatccttgctaattccaaagttgcactttacagaaataaaaaattaattcacaaaggtagaatcgaatctttacaaagagataaaaacgacgttaaagaggtagttgctggaaacgaatttggaactcacatagttaaatttaatgatattcaattaggtgatataatcaaagcatatcaagatgttgaaattgtagaaaaagagtaaattatgccaaaaatttctattcaaaaaaaagaatcacattaccaccaactaatagcacaaataattaacgaaaattttaatgaaaaatttgaagtttcaattacagcggtgaaattatctaatgatggttcgcatctaaaagtatatttttcctttttaaaaaatgacaaaaaatcactagaatttttagagaatgcaaaaggttttattaaacgtaaattagctcaacaatccacttcatacaaagtacctgagcttcattttgaactagatacagtagcaaaacaagttgaaaaaatagataaaattattcaaaaaattcatgaaaaagaaaataagtaaaagtaaacaatttaaatcatttttccttcttttttcttcatctattgcttcaattattgcattagtttcttgtcaaaatacagccaacgatcaagccgcagtcgaagagaaaaatttttatctaaaacacaatgaaataattaagaccactaaagagaataaaaattttcaagagcaaaaggcggttattttcaatgtaaattctgatatggatttttcaaacgcgcttagcaaaagttttaagcatgttttttcagtcattgaaggagaagctacaccatcactaagaatagaaaatattgaagatacaaacattgaagctactttttttagaatgtttaacgattatattgaccaaggatttaatatttttgcttttaactcaccaaaattagtttcatcttttagcctttgattaacagcgcccaataaccaagaaacactaaaagaaaaaaatattaaaatattaacctttgatgcttcaaaacaattatcaaaaattggaaataatgacagcttaatctcttttaattttcttccagaagatgtaaattgaattgcaggttattttgcatctagttatttagctcagaactataaagaagaaaaacaaagaaaaattttgatttttaataataatcgtgatgatgaacaccaaatgaataaaacattaggttttttagctggaattctttcttgaaacaaaaataatcctaatttaaaagtaaaagttgatcaaaatagtgatgatattgctttcattaacaatgatgaagataaaattagaacttttttaagcaatcctaataataaagaagccaagattctctttgtagctactaattctttaattcctttagtttataaatattctgacaaagcaaatcaaaaattaattgtaaataatttcaaaaataacgaaattaaaccaagtgatataaatccatttttaataattaacgaagatttaaaattgttattttataaattaatttatgacttatatactaaaaaagttggaactaatgatagtttgttattacgtaacggagataaaaacataattttttatgtatcttataaagataaattttattcatttagctcaaaattcaatccagcaaatcaaaaactatttaatgaagcattgaacaagtacaaagatattgttagagataattttccaaattctagtcgctaccttttagatacaaaacaagtggctagtgaagaaatttcaaactcattaagcagacttttaactgacattcatacaattaagtagtatatttttaatactttttcttcaaaaattactaaatttttaaatttagtattctttttatttatttctataaaattaatataatatgcaaaaattaatcaatctacatacaaacactgaatatagctttttacaatcgacaattaaagttaattctttaatagaatttgccaaaaaaaatcaactcaaacacttggttataaccgataaagacaatatgtttggggttgctaagttctataatgagtgtaaagctaacaacataaatcctattattggacttgatttagaagttcaaaattttcgttttattttaattgctaaaaattatgaaggttttcttcatttgtcttttttaagttctaaaaaaatgtcttttgaagaaattaaaattactgatttagacaatgaaaacataattgttatcgatcatccaaagctgggtttatatagcaaaagcaagcaaagactaaattttaaaaattattttgttcatgcaaatgatccgaaaattgctaatgcagtttatgttcagacaagaaatgttttgtttgcaaatgaagaaaaatacttaaaaatccttcataaaatatcagatagttcacagccactaactaatgtagattttattgattttgaagactgaaaagaagaagttcaccccgaaataattaaaagaaccaatgaattagtagaagatattaaaatagattttcctaaagctacaatgatacttcctgattttaaaaatcaagaaaacttaaatccagctgagtttttgcaacaacttttagaaaaacaagtagccaagaaaaaggcagaatttaaaaaatatcctagctttaaagaaagattagtttatgaatttaatgttattaaaaacttaaagttttcaaactactttttaattatctgagattttctaagatgagctagaaaaaataatattttaataggtccaggaagaggttcttcttcaggttctttaatttcatacttacttaacataactcaagtcaatccactcaaatttgacttgatttttgaacgttttttaaatcctaaaagaatttcaatgcccgatattgatatcgatgtacaagataaccaaagagataaattaattaagtatattcaagaaaaatatggctatgaaaacacagctttaataataactttttctacttttggggctaaaatggcattttctgatgttgcaaaaaaactcaaaaatatagcagcttctgaagttttagcaataacaaaacatatacccgctggacatacattagaagaagcatacaaagtaaatgcgaattttagatcttttgttgaaaaacaagacaaaaatggagaatttttatataaagaaatttttgaaattgctaagtttttagaaggaatgccacgccaatctggaacacatgcagccggaattgtaattgcagataaaccaatttataattatgtaccaactttaatatccaaagaaaaatataatcaaacacaatttagtgcagaattcttagaacaattttcattattaaaaatcgatttattaggattgaaaaatttaactgtggttcaaggaattctaaattcagtaaatcaagaacataattttctacttaatttcaacacgattcctatttttgatgaagaaactaacagattattaactaaaggaaaaactgttggtattttccagttagaatctcctggtatggctaacactttaagaaaagtaggagttaatggaattgaagatgttgtagcagttatttcgctatttagaccgggaccaataaaaaacattcctttatatgcgcaaagaaagaaaaatgaagcaaattatgaaggaatttcacaagaatataatgatattttaagttcaacttacggtattattatttatcaggaacaaattatgcagatttgtcaaactattgcaggatttgattttgcaacatcagatttaatacgtagagccatttcaaaaaaagaagcagaaaaactacatgaagctaaacaactttttatacaaggtggaattaaaaagggttattcagaacatattttagaaaaaatatttgaacaaatcgagtattttgctgaatatgggtttaacaaatctcacgctgtagcttatgcaactcttgcttataaaatggcatatttaaaaactcattttcctttgcagttttattcctatttaataactaacgaagatggtgctcaagccaatattgctaaatttataaaagaagctcaatcccaaatgaagtttaaaaaaccaaatattaatatttcatcaacttcagctgtttatgaattacaaagcaaaacaatttatctgcctttgattttgattaaaggactaggtgcggttgcttgtcaaaagattttagacgaaagagaaaaaaacggaacttacaaagactttctagattttgtaattaggatgaaaatcatcaacatttctaatacaattatcacacttttaataaattcaggtgcacttagcgattttggaaacatacctactttattagctaatttatcaactgcagaatcttataaaatttgtattttagaagatgaaaataaaaatttatactgtgattattcattgattccaggcaagtttgagcttgaaaaaaaagaagatgatataaaattaactatggaaaatgaagcaaaatttttaggaatgcaatttagtttgccagagtctaataaagatttacaaaatgaagttttactttcagaaatatatccaaatgttgaatataaaatgattttatatgttaaaaaagtagcaaatttaacttcaaaaactggtgtgtcaatgaaaaaaatcacaataactgattttcaatcacctgataaagatgtttgactttttggaagcaaaataaccttttttgaagcagttagagaaaaagagtattatgaatttaaaataattaaattaaaagataaattagtattacaaaatcatttaaaggaaataagatatgactaacagagttttactagtagatggcaatttgttgattttcaagtctttttatgctagttttaattttaaaggaaacaatatgcaaaacagcgaaggacaagaaacaaatgctattcacacattttttctttctttatttaaagtaataaaagaacttagacccacacatatttacatagcttttgataaaggttcgcaaacagaaagacatagtttgtttcctgattacaaacaaggaagaaaaaaagcgcccgattctttattttcacagttaaatttactaaaagaaattttgactttagcaaatttaaaatggtctgatgattttgactacgaagcagatgacttaattgcttcaatgaataaaacctttttagaacacgatagaaactcaaaagtttttattttttcttcagatcaagatttattgcaattagtttctaatcaaacatatatcgtggataaaaacaaagacaattcgtttttaataaaatcagtagataatttttatgatttatataatttatttccagcacaaataccagattttaaagctttatctggagatagttctgacaatataaaaggtgttccaggtattggtccaaaaacagccaaatcgttaattcaagagtatgaaacagtagagaatttagtaaataatttagatcaattaccttcaaaaatgaaggaaaaattaaaagaacacaaggataacatccttttatttaaaaaactaacaacactaaaaacagatgctaaattcagctttgatatttctgaaatagcacttagaatttctataaattctaaattattagatttactaaaacaattagaacttaacaaagttattgaacaatttcatgttatttccaaagtttaaataacaataaaaaacacgaataacttcgtgttttttattgttatctttgtgattttctatataaaaaatcttttatagccataacaacaccttcttgattataagcacttgtgtggtatttagcaaaagtttttacatattgaattgagtttgccattgcataagaataacctacaacagataacatagaaatatcattttcgctatctccaaccgccattacattttgaatgtcttcttgaaaaatatttttgcaaacatattctaaagtatagccttttgaagttggtttagtagttaattcaatatgagaacccacagaaaaagaaatatttatttcttctatatctttacattctaaataagctagatcaagactttttgcactaccataaagttccattttcaaaatgtcatcatgagtagtatttgtaaatttaactacagaattatctaataacgcataattaaataaaaaattagtgttttctataaaattgaagcaaaaatattctttattgtttcaaaaatttacttgcaaattatgtttttttgcaatatttaaaacttgtttttgaattttttttgaaaaactagaaataatatattctttgttttcaattaaatctgtaaaaagtgctccatttgaagaaattatgtattttacttgtaattcttcagctaattttttaattctagacatataaggattaccagtagttatgattatttcaaaattcatttcagattttttttctataaaaaacttttgagtttcattagtgaactgaaattctgtaccgtaaattgttccatcaacgtctgaaaaaacgtaatttttgttcataagcgaaattatacattatttaaatcttttagctgataagtattttctaaataatttcaaaattaagaagattattattggactaacaatgatacaaattggaataattcaaactaaattattttgtttattgtcttgattttcaagactaatttgttcaatatcagatagattagttactttattaaagacataaaattgtgtttgtccttggatttttttgctttctggtttagcttctaatttaatgtttaagatgtttttagaatctttttcttgcagtaatgtagctaaaaatcctttttcttttagagaaacaataaaataatctttatctaactcaaggttaaaaaactttaattttaagctaactcattttttaatttcttcaataatctgattttcagaactgagtttaatacttaagtcatctaatgttatcttagaaaaatcaagtttaacttttccagaaaaattaattagcttaactttgaaaattaactcatttttaatattgagttggtttgaaaaaagtacaaactctacaaattcatctttaaaagtctttaacatttcaagtgaagtttcaatgtgtttaaaattcaaatcagtttctaaaacaagcttatgactatttaattgtccacttaaattatcctgaatagttgttaaaaactggtcttcttttgtagtttcataatcaataattaattcttttaatttaatggtttttaaatctaattcttgattttgatagtgttgattttctactttatttataattttaattactctaaagttagaagaatcttgaacatcttttacttttaaataaactcaattatttaaaaaccttttatcttttacaagagagtcttcaatttcgttgagttttatgtccttgttttcaattaaataatctctatcaagtttaaattctgaattaatttgatttttgatgtttgtttctaaaaatgtaagtattttatcttttgtaaataatccattgatgtttaaagtttgtaggttaaagttttcaaaaatattttttctgattgtttcttggattgttgtattgtcattttctagaaagtttaagtcgatttttattagcttgtttttggtttcaatataaaagtttttgtcaaattcaggcattaattcaaaaacaaataaaataaatttggaatcatattttacttttcaatcgattttatctttattttcaaaatttataaattgatttaagtcagtgtaaataaattttttaaaagttgttctttttgctatgttttttattgcttttgaatcaacattaggaattatttcttctttattttctttagcttcagaatctaaaggagtatctaaaataacaaattcagtttgaacatttccttcttctacatcaagttctttagaattagaaatttctattttataaagcccaggaatgtcgatatcttcactaatttcaacctcttgattgtctatattttgattattaaggataatttgttctaataattttttcttttcttctggtgttcaacttgaatcttcagtatttaatatttggttactatcgtttcctaattcatttgaacctgaatttgtatttgtcccatttttctttgaagaattttcttcacgatttgagtgttctacgtcatcaatactaggtggaaaaggaattttattattagggtcattgtttgtagaatttcccggattatctgaagttaaattatttccttggttagtatcattaggattatttatttggtcattatttggagaagtgttttgttcattattctgattgttattagatgaattagaagaattatcagaatttaatttgtttgagtcttgagaattattatcttgttgagaagaactagattgtcttcttttttcttcattttcctttctttttttctttattgtatttacaacttcttctgtattgattgaaaaaatttgttttgttccatacacgtttctatcttgattatttcaaataaaatcattaatatagtcttttcatttcaaaataacttgatcataactaagttgtttaatttgatctaaattgtaattttgtttttctgttaagtattctgccaaatgtttaccatgagtagaatctcaaaagttataaatttttatattaggaaaaatttcagaaaataattgattatttttgtttttacctactcaaataattttaaacaaattcattgatctagtatttttgtaagaaaataatcaaattccttcacttgagaagtaattttcttcaatttcactaattttaaaattgtgcccatttttagataaaggaaaaattagtggatcgtaatcaaagtcaaaattattaatatcatttcttactttaaatcttttaaataaagaattcgaagaaaaagatttgaagtttgctcctttttcaataacactagcttgagcaataattccaagatcaaaaagatctgtgtcttttattaaatgacctttatttgactgtggatcttgtaaaaactgtgttccataaggcaaagaactatttgaaaaatcaattcaaactaattcatttttagttccagttacaggatcaattaatttgtcgtaatcaggattcttcattttttgacctaattcgtcaaaaataaattctcctttttcattttttaaaaactcttcaattttagaacgttgttttgggtttgaatctggttgtcaaccaaatcactttatatccattttaggttgattatttttaattttaataatcatttgtcattgtgaaattatttttttgttttcaaaatttgcattttctttgtcaaattttaaaactttaattttatatatttcttcagtattttcaagattcataagctttaaatcaaattcaaatttttgatttaaaacatcaactttttcatcatttacatataaaatttcgtcttcttttaatgttgtgttaaaaataactttaacattagaatcgtaaattcatgttccaccatattcacgagaaagtggtttgtcattttcttctctcacaggaacatcatcaattaatttattggaaaaatttcttttatcaattgtttttccaggaataactttaattctttcttgtagatttttagacttaaaaagatctgtgcttttgtagcgaatattcacatttttaattacatatttataaacattttgatcaaaatcaggttctttaaaagtaactaataaatcaaaataatcatctttttttcttacagtagaaagctcatattttaaagaaaaatcagtgttaagacttggctttaagccatttcatcaactactaagtgctttttcaaaataatatttgttagatttgtctcttgaagaaactgttatgttagaaattccattaatttctcctgtgtctgtacttatttctacgtaattatttttaaatgttttcttaaaagagtcttcaattttctttatttgtgcaaagttttcacggtgtttttgtatatttttctttgctgtatattcgagatcaaaactggttataaatttaaagtaagttaactcatttttttgttcatgaggaaaccaatctgttttatgatggtaaggaggtgctgttaaataaaattgaatatcgacctctaagtttttaatattaaaagaatttatagtttgttttttagcttttatttctctatgaatttgatttatataattttgtgcagaacgaaaaatatgggtttttaaaggaattccgttgctaccatctgctgaaaatatagtgttcgcaggagtttgattaattgagtttaaaagtgcaaaattaatatctacatttttaaatgcatcatttatatcatctaccggcacgttgtaaaaatatatttctgcaaatgaaccatcatcaagttctaaacctcttggtttgtcttttgagccataatattctcgtaaatctcaagtgaatttatatctaccataatatcttttcaaaccacgatttatgttgattttagctccatacaaaccagaaactatttctgttacatctccagtataagttcaagtattacctttgataacataaggatagtttgcagtttttttagatcatcaacttgtgttatttcgatatttaatggttggataaaattctgaattaggaatattgaagttcagacctgatctgtatgcacctacaatagcagatgaatttacttgtgatacaaaacttctactatctctataaacaaaatctgtttgtaagctaggattgtattctacagaagttttgttatctattactttaatgtttgcgcttgcaaagaaaacaggaaaaaataaactaacaagtaataataatcaaaactttatttttaaaaattttttaatttaaaattacctccttttcatattcgttgtagtttactcttaaaaagtttttctcattaaaagaacttagtaataatagttgtcctctttttgcatttaaaacaaattgactatcaaatttatttaataagttggtttcttcattttctgcgtttgaaagaggattaaatatttgattgatcattttaatatcatcacctggaagatgtaaaaagaatttatattgcatattttttaaaattgcttgtgttttgttaattaaatctttagataatgcaaagtcatttatattttgagtagaaagtataatagaaccattaaattttctaattgttttagtagtttgaaaaataaaattaagagttgttaagttattagaatcgataaacttatgaagttcatcaattactaaaataaatttcttgttgttaataaaatttttgttaattttattttgaattaaaaaaattatcaagaaaaatgaagcatttacaaactcaactgagttattttcaacaaaagtttttgtatctattattgtaaaattatttaaaaaatcaatagttgtatgattattaaacattttttgataaagtccgttatttgtaaaattagtaataaatcagttttgaattttaattttagattcaaaataaattttttcttcttgttcatttttaaattcaagaagtctaatttctctgattagatgatcaattattggaaattgatgattttttagttccaataagttaatattcgaatcataaaatccatattttttgtacatatttttaattgccatagttaaaattagttctttttcttcatccaaattaccatttagaattttgattcattgtaagaacatttgaatttgcgaattaattaagaacaaattattgtttttttgattgtcaacaagtgatgcacttatttgtaatggatttaatgacatattatttgaagacaaatctattaaagaagtgttcaaaaatgaagaaaaactagtatattctctttgtggatctagtattaaaactgaagcattttgtttaatataactatctaaaattaactttttaattgagcttgtttttccttgacctgaggttccaaaaaaaacacaatttgagttggtgtgtttttcatccctttttcaaatatctaaaatagcagctttttgattgtttttccctaagataaatgaatttttgtcaatatttttttcaaaactaaaaggtcaactataagaaatatttcttgatacaaattgaacattttcgttaagtttttcattagcaccaaattgtaaattttgaaaagcatccatttgtctaaaaagtaaagggtttggcttgcatttttctagtttaatttctttatataatttagcatctaattctttttttaactgatttcaattttctttttttgtcaagaaaaataaagaagaatcaaagagtttttgcccttctgagttaactaaatgcatagtctcatttaatgcttcaacttgttgtaaatccttttttgttctataaattgaagtgttgttgaacgacatagaagttttgatattattgtcagctttatttaaaattttttcataatcactttcttcaataggatttaaatgtcaaatcactcaggaagaatcgcaattgaaaaatgaatttgctcaagcaatgtttaaatttaatgaatattcagaaattgtgctaattttgtaaaattcatcatcaattttgaacttattgaagaaaaattgtgctttttttacttttaacaaattatccaagttttcaaagtctttttcacttaattctttttctgttgatttaccaacaaaagattgtaaaaatttaagcgtttttaattgatctaaagattgtgtataaataaataatttttcaaattcatcaataattatttcttcattttgaagcaatttttcttcatcttctgcataaagtactacaaaatattgatcataactttcaaaaacattcattgatgaaatttcttctcaagacttataaagatagttataaaaagcattataatcttcgtttttaacatctttgtgttggattaagtcttcaatttgtttatttaatgattcaatattagtttcgtaattaaagtttttgttagtttttacaaaactaattttaaaatccaaaatatttaaaatacttacaaaactatttaagaaaatttgtctttcattttgattttgaattcaaatatttttaccatcaaattcgatcacttttaataacaaatttttctttttgagtttaataattccgtttttttctatagatttatagatattgattttcgaagtgttagcagatggactattaaatttatattttttattttctaaaagatactttaaaaaataaattaaaaattgtcaaatccgcatatttcatgtaggtacaaaaattaataaaatagctaataaagaaaataaaactataattacaccaatagaaattaaatctctataaggtacgctagctggtacaacaaatcaaccaagtgaaattgaaataacaaaaattaaaaaagaaactataagatcagaaaaataaaagtttttaaaaatatgaattttatttttcttaatcgacttaggttgtagcatttatttccttgtacattttaaaaaatttatggtcttggaaatctaattttggtgtcttatagtctttattttctatgtttcattctatgttaaattgattattatacttcgcaaacaaatccaaatttaattctggaaaagcttgttttttattgaattgatactttggttcgttgttaagattttgtaaattttcaacactattttcgtgtttattagttacaaaatgtttagcatttttaaacaaatcttgagtttgaacaaaatgctgttttaatttataattttgatttgtaaatttataaactaacttgtttaattgcgttgaagcaataagtccgcctataataaaaagactaataattatatttttgtcaaaaattccttgaaaagacctcaaatctcatttattgataattaagacgtaaaattcaaagagtctaagccctattataaaacacattattgtcaaaacatttcttataaataagttttttcaaattttaaatctatatgcattatcgtaaatcattgttgcataaataaagggactaacagaaaataaaacaagcatttgaaaagtttgcattgatactctaacaatagcagaagctagcgttttaaaagatcaaattccaataagcgctggaaaaaataatatagcagctgacgagcctggaaatgataagaacataccaatagtaggtgctgaatattcaagatttgctaaatagagtcaatcagatgcagccattttgtacggaagcaaactcataaaaatactatttgctaaattagcctttatttggaagctttttaaaataatttcgaaaaaattattcaaaagtaaaagtgtagaaaaaataataattggagttaataaaagaagtacaaaataagaaattatatgttttagtctagataaaaaactataatttttacttcttaatcctttattaatacttcattttagaaatacaaataacaaaataaaaataaataaaaatagactaacaatagcaaaaattttaaagtaaattgaagtgtttaattggtcaaaatcgaaattatcaattctttcaatgccaaaaagcataaagttaataaatgaaaaattgataacttcaagaagtttagaaattaaatttagtaatgaaaatggtatttgaataaaaatagttcatataaaaacaaaaagtggaaaaaataaagttcgttcaaacattaagtcgttaaattaatagcagctttagttgaaatatctactgcatatttaatacctatagaaaatagaataactgtgataataaaaactacaaaaactatcattatatgaactatgtattgtttccttttttgtccatgtgagtaagcaattttaatacctgtataaaccagtgcgaacattaaaatcaaagccactagtccgctaaatgaagacaaaacaacatatcctattgaacttgctttagtagctacactgtttaaaatatctgttgaattatcgttaaataaaacgatatttagtaaattattcaaaatttatctccttatatacatcttttacttctgtgattaaattagcaccttgctttattaattctgtgtttccatcattttcaaaattaatatctcctggaaagcaaaatatttcttttccaatcattagaaaatggttaactaaattttgtattccacttgcttttgaagaagaataaacaattagattttttgataaagcagcaactaatctatttctattttttaatcttttatatgaaacattagtgtttgggtattcagaaataagtaaaatattctgattattttgttcaaacttagaagaaattcaaggattttctactccatttgcagaaacaaaaattaatttgccttgattttgaagaaaatagttgttaattttttcttctactcctttgtagccatttgtgactaatgtatgtctttttataacttcagatagtgatttatctaaataagattgaacaatttcattatattgttcaccaactaagcttattttaggtaaatcattttttagtaagtttatgttccctttgtaaaaaattacaaaaggtggtgtttttaaatgtttaaaaacttctggataaacagagtctaagacagtaaatgcttgaatgcctttttgttctaggtcatccataacagcttgagcgttctcgtcgcttaccctttcgttttcttttagtgcttttagtattttataaaagtcacctttgtattttgttgcaaaataaattaatattgatttcatttttttcctttcaccttatatttcttaaaattggaaaaaaattaaataaaaaaatttttttattaaaaaacggctttttttcataaaatatataaatattaattatgaagaaacctaacaaatatatcaaatccatacttgtaaaaaaaaagaaaaataaatactttgataaagcaatgtatttttttatttattttattttattaataacattaggtctttttaaacacaaagactgaaaaactagaacatcacaatataaggaattaatttcaggttcagtagctaatttatcatctaattcttttttaattgctactggacaggctttttatatcttaatttcgtttatccctattattacagtaataatgatacttttagctagcattaattttagaattggaaattcaagcccatttaatgtttttgtaaaatcagatattctaaatagatttattcctggaatagaaacagcattacctgattttttagtcacttttaaaaaattagattgaaaaaatgttggatttatatttttagtattttcaacattatgaattagtatcaacgggtattcaaaattaatagcagcacaatctaccatttataatcacaaaaataaaggaagttgactttattcaaagctaaaagctctttcaatagtgcttgctataattgtattcgtcacaatttctttgataattattacaccatttatgatgtatttaaaagaagttgatgcggcacattatgaaatttatttttatcttttttgttcattttacttgctatttttctttacaataggttgattattaatgtttaaatgattacctgtttttaaattaaaatttcaagacattgttcctggttgaattattgcttctttatcttcatcgttatttgcaatgctttttggttatttagtatcaaataaatttattaaatatgacaaatacggaactatggcttcgtttttatatttatctacttttagtttgtatatttcttactttttttactttggactaacaattaattactcatatgctcaagtattttctactaagacatttcaatctaaaaactttagtaaatataaagttgagtacacattataagagaaaaaaattgttaaaaaaagaagtaggaattcctacttcttttttaaatttaattaattaacgtttttcgctatatactgaagcatattttctattctttttagtttcatatttaacgaaaccttcaattaaagaatataaagaatcatcattacctcttccaacgttgaaacctggaaagattttggttcctctttgacgaaagataattgctcctgcagttgcgaattgtccgtcgctaagtttttgtcctagacgtcttccggctgaatcacgcccgttcttagtcgaaccacctgctttggtctttgccatttcagttttctatcctttcaattcagttatttttacacgtgtataaggttgacgatgacctagttttcttttgtgtgttgatttagcattgtgacggtaaacaacaatttttttgcttttaccttgcttttcaatcacaccttcaacatatgcatcttttactaatgggtttccaattttattgttaatcaaaacaatttctgaaaaacgaactttgtcgccttcttttccttgtagtttttctacaaaaatagtttcatcttttttaacaataagttgttttccaccagttttaataattgcaaacatagtgtactccttattaatatggctcatctttgaggtgctatgcttaaataccttttcagaatggttacttaataagtaacagttagaattttatactattatttttaaaaaagaaatttatttttagttttctaaaaaaaatttataatttattagctaaaaaatctatttttttatttatataaaatggtaaataaaagcttaaaaaatttaatagattttctttaattattttaaaaaatccttcatttttgaagaaaattttatcaggaagacaatgttgtttaaaagcaaaaaaaagaaaaaaatattaattacaggaatattactaacaacaattgcaagtattgttgctattccggtggctattaaattctctcctgctttaagaaatcataattcttgaattcaagtagaaccaggcttgaacaacggaacaaacccaggaattaaccacggtgatgatgactttaatactgttgtagaagatccagtagttattgatagactacctttagatagaccagaagtgattttgtcttcagtagataatcatattaaaactaataattctcaattagattttaatatcattgacagatctcaatcttttaaaagcctaaaagtagaaatttttgaagatgataaattaatttttacccaagaagaaactaaacaaaataatgattccatttccttaaaagcaccaattttaagtcctaagaaaaaatatagagttgtttatttagtaacatatttttctgatgacagaagaagtaaaactaaatcatatacaaaagttgttaatttaaattttaaacctgaagaagaaaaacaacctcctactgatactcaagaacaaccacctcaaaaaataaatattgaaacagtagaagaaacaataacaccatttgcagtttcagataaaaaagctttaaaaattaataaagaaaatataaacaaatatactttatttagagttgatgaggacgatcatttaattccaattaatttcttgaatgaaagaccaagagatattacaaattatttcgttaaagtatattatgataaccaaaatgcttcatttttaaaggtaaatcgtattttttcacagaataattcttattttgcttctgtcgacagtgttaacgatcaattaaaagataaaaatggaaaaccacagaatttaatcttcaaacttaatgaaaaaaataataatcaaaacatcgaaaattccattcctgtcttttcttttgctgatttaattgataaagtttcaaaaaatccagacgctaattttatagtaaaaaatgatttaactgctacagatcctgattcagacaaagacagagcttatattttagaagaatttaaaggtcatattaattttaataataatactattatagggctcaaattacctttatttgacaagataaaagatgcaacaatagaaaatttaaatgcagttgaaattggtataaattcaaatgctaaaaatgtaggtactatagtaaattcagctaaaggaagtgttattagaaatgtttatgctgaaggtactatcgcaggttttgatggtataggaggtatattagctttcggtaaagatactaaaatttattattctcatttcgaaggctctatttttgcaaaagattatattaattcagaaaatattagtatttattttggtggtttagtatcagaactatcaggaccagaatctacagtagaaaattcttcagctaatgtaaaaataacaacaattggtacaacaaataattctttaattagacaagctggattagtaggaagattaatagatgctgctcgtgttacaaaatccatgagttttggtaaattgtttccaagtaagtgaaatgcttattctggaggtttagttgctactacttgacagcgtggaaaattagaccattcaatttctttaatagatgctacaaaatactttagacttcatggtgatgatgactatacaaacaactgagacattaaagaaatttatggtgttaaagaatattcaaaaggaagaaaaggtagatactataaagaaatttcagtagcagatttagcttcaaaaatgaagggatttggaatagttttaaaccaaaatgtcaatgtaaataactatttaaataaagaagataaaatagcaaacaacttaaaaaatcaagatttaattatcaaatataatcttgaaaaattacttcctttttacgatagtgcatacatcaattttttagcaaaatctgtaaataaagattctaatattgcaaaaaaattaattaaatatgtcattaattttaaagacgataaacctatttacgacgattcagaagcaaaaacacttaataaaattaaaattctttaccaagataaaagtgtagattacaaaaccatagaatttaaatcagattttgaaaacatagcagaatattatatagatgattttaaagcaagttatacgccatacgctcttaataaacaatacaaattaaatcctgctagactagagtcattaaaaaatttatcatataacaatatttacttgcaatactattttaatattactgctgataagtttgaaaagcttttttatgaagattcttttaatgaaatcaagaacaaaatagaaggaattttaaacaaaattctttttaatgaattctcacaaatacctgattctcaagagttaagagacgcgatttttgaaaaagtttacaacaacaaagaaaaactgctttttgcaatttcttacataaatcgttgatatgattttaatgttgatgatttaaatgtaaaagatgttcttttttatgcatttaattattttagtgataaaaagatttccgttttagactgattaatttcaatagctaactatccaataggtttatttactgcccaaaataatctaagtttctttgattctctaatttctccatatgtcggaggattaggtctttatgactttttagaatctattgttaattatggaaaaacaagcaaagtagatatgaatcagtgattgattgaacattcaaaagtcaatattcaagaagcgaaattaacagaacctgatgcaataaaactacaagaacaagatccttacagatactcaacaaaattatgatataaaatgcaattaagaggtcgtttttctcatctattattaattttgttaaccatgaaacaaaccagagcttatttagttacttcagtttcaggacttactttcggaatgtacgaaacatatgcttgatttggtaacaaaccaggagatgttccacaagaacaaatcgacaaagatataaaacgaatagatgctttagtaaaagaacatactgaggcagaaacacattattataattattgatgaagagttctaagtccacaaaatagactaagattagttgaaaacatttacacttcagatacattatttgtttctattcctgatccaaatcatccaggaagaggtactcgtcgttatattcaagatcaaagagaaaattataaaaatgttgtaggttattaccaatttctaggaccagccattaactgaagaaacacagctcctggaacatctgcagttagttgaggagataccaattattttacaggagcagaacttttatataattgatctcaaggaatttatactcatgaaatgacacacagtttagatggtcgagcatattttaatggtttaggaagacgtgaaggtctttacggagaagtttttgcttcaggattgctagaatctgctgtttgagtagatactcatgaaggtattgcacttaatacagtaaaaacagatactagtcaaaaatcacaagacagaagaataattaattattcgccagacatatttaaaaatgctacagatcttagaaattattttaaacatgagtttgatttaatttatttaatggagattgcagaaacagaaatttttagtgaaatgatgaaagatcctgctaagaaagaaaaacttagagatatctttatgactgcaattacaaatccaagtggagccaacgtttttgaagccataagtaaagaaaaatgaagccaaatgcatctagattctattgatgattttgtagataatgacattatgcttacattagtttgagaacctgcaactattcgtcaaaattgatattatttctgatctttaccagattcattatatggaacagcagataatcctcaaggttctcctggagatataactttaaaaagattttcatatgaactattaggtgaatttggttgagataatggttttgttccttatttatctaatcagtacaaaaaatttagtcccaacaaaaaactaagtgataatttagtttttgaacatctttttgaaaaaacagcatatgaaggtaaaactgtaaaagaatttaaaaaattaatgtacaaacagagaagcaataagaaggatttactaaaaccagtttcaataataattcctgattataatccaaaaggaaataatgtttttcctggcaataaatttactgtaaataattatcaagaactaaaaaataatcttaaaaaagctatagaatatgatttagatcacaatagcattggttataaaagaagaaatagaaatgccgcaaattctagtgtttgaaagaaatttaaaaaagcaatgattaatggttatttaaaatcaacaaatgattttaaaacttccatttttaaagaaaatgaagaaaaataaagcaataataatgtgtttaacgcacattattttttatttttcttttccttttttattttttcaatttttgtttcttcttcctttataattcaaataatcattttttgaaacgaggattattatgaaaaatatagaatttaaaggtattggagcttcttcaggagttgtgaaagccaaagtttacaaaattgaagaagttgataccaaaattgatgaaactaaaattgaagatatagaaaaagaaatttctttgtataagaaggctttagaaaagtcaattcaacaaatagaatctattaaagaaagagcaaaaaacaagctaaaacaagaagaattagacattttagacgctcacattttaattgccaacgatccgatgataaatgatgaaattattgaattaatttctcaaaaagaaaacgctgtttatgctactgatttagttgctagaaaatacattgatttgtttttagatatggaagatgagtatatgagaggtagagctttagatataaaggatttaactaccagaattatcaaaaatttattaaacattgatttattagatttaagcttaatttctgaagacgtaattattgtagctaatgatttaactccatctgatacagctcaattaaactcatttgttaaaggatttctaacaaacataggatctagaacctcgcattcagcaattatggctagaagtttagaaatccctgctattttagctttaaaagatataactgaaaaagtacaaaacggtgatatagtaattatcaacggtgatactggtgttggagttattaatccttctgaaaatacaattttagagtacaacaagcaatatgaagaatatactcaaataaaaaaagaattagaaacctataaaaataaagagtcaatttctaaagatggtaaaaaagtagtaattgcagccaacatcggaaatgtagaagatgtagaagcagttttgaaaaataatgcagatgaaataggactttttagaagcgaatttttatatatggatgctagcaattgaccaacagaagaagaacaatttcaagcatataaaacagttttagaaaaaatgaataataaaaaagttgttgtcagaactctcgatattggaggggacaaaattttaaaatattataattttgcaaaagaactaaatccttttttaggttatagagctattcgtttgtcattagacagaacagatgtttttgaaactcaattaagagctttgataagagcttctgagtttggaaatcttgcgattatgtttccaatgatagcaacagtcgatgagtttttagaagcaaaaagaatttttgataaaacttttttagaagtaaaacaagaatttcctaatgttaaagacgatataaaagttggaattatgattgaaataccagcagcagctatgattgcagataagttagcaaaatacgttgattttttttcaataggaactaatgatttaattcaatattctatggcagcagatagaatgaatgaaaaagtaacacatctttatcaacctttaaatccttcaattttgaagctaattaagctaacaattgatggtgctcacaaacataataagtgagttggaatgtgtggagaaatggctggtgatatttatgcaattccaattttattaggtatgggattagatgaattttcaatgtcagcaagtagtattttgaaagtaaaacaactaatttcaaatacaagctacaacaaatataaacatctttgagaacatgtaaaagaagcagatagacaatctgaagttgaaaaaattttaaaaatacatcatacaaaataaagaaaaggcagttaaaaaactgcttttttctttcgactttttaaaatttgttaaaattatagtattacagcaaaggaccaattatgacaaacgataagttaattaataaaataaaaaacgaaatgcaaacttgattagaagatactagacattgatttcatcaacatccagagctttccaaacaagaatttaaaaccgctgataaaattgaagaattactaagatcttttggttttgaaattgatagaagcttgtctaaaacttcaataattgctacattaaaaaatggagaaggacatactttaggaatcagagcagatatagatggattgcctatgcaagaagaaacaggacttgcttttgcttcaaaaaatgaaggaattatgcacgcttgtggtcacgatggacacattacaatggcgctaggtgcagcaaaatatttagctaaatacaaaccttttaaaggaacaattattatgattttccagtgcgcagaagaaataggttttggtgcacaggaactagttgataatgggttatttaaaaagtataaatttgactatattataggacttcatggaatgtgccatagcccagcaattggaacagcacaagaaggaacactatctttttatccaaatcaagatgctatgatggcttcaatgaattctttcgaaatcaagctaacaggtagaggtgttcatggttctgctcctgaatgatccatagatccaattcctggtgcacttgaattaattaatagcatttattctataaaaacaaggatgattccttcagataaacgttctgtaatttcagtttgccacataagtacaggttctggaacttctccaaatattattccggattgagcacttattaaaggaacattcagaactgtagatgatcaaagtacaaaaatgtacaaaaaggcaatagataaatttgcgaaattcacagctaaaaaatacaatttacaattagatataaatcaatgaggttcaccagccgtaattaatcatcagaaactaaatattcaaattaagtcgttaactgaaaaagaattgggaaaagattttgtttcttgaagccaacaagttatgggaggagaagacttttcttgctatcgtgaaggagcaaaaacagtatttgcttttatctcgacaggtgaaaatgcacctttacataattcaaagtataactttagcgataaaacattagcttatggtgtagcttattttgtaaatgtggctaaatatttattaaaataaaaaaatatttgacaaaaattatttttatgttaaaattaatattgcttcagaaataaaaactatttttaagcaatatccggggggtttgcagagcggccaaatgcgggtggctgtaacccactttcttcggattcgggggttcgaatccctcaccccccaccattttgccccatagccaagcggtaaggcaacggtttttggtaccgtcatgcgttagttcgaatctaactggggcagccatatgaaatttcactgcagttaacttttattaaaaataatttttataagagttgactgattttttttgtaaaaaagattttattactgtcttttttcaaaattatttataaattaacattaaacaaactatttttttgcatggtttattaaatcctaaatttatatatgtaatcaaaattacttctaaatataaaaaagtaaaagataaaataaaaatagtatttattgcgcattatattattaaattattttattttttatgaatattgtgtttattaagtaataagaaaaataatttttctctaatatcaactgaactaatataggttagctaaatatattaatttttgttgattttccaatattagagttcctttgttaaaaagtaaattatatagtttcattaagttaaatttatagacaaaaaaattaaaatataatcaggttaaaatagtaaaacttcgaaatttttatggcttaaaacattattgctattttttgtaactaagtacgtactttaaaattaaagttaaattgcagaaattttataaataaatttacaaagagcaaattcctttttatattttaatttttatttacatagaattttaatttattcatatacattaactccctttcatatatatttgtattaatcaagatcaaaagttttccaagaactaaatcaacctaaccctttcattttcaaatcttatatcattttcagagttgttatttttattaaaacttaaaagtgtttacattgttttattaacagtcctttttgatattaatttttaaccctatttcttagcatttggcattcctttctatattttaaatatttaagtttggacaaaagatctaaaaaagaattttcttactttattaaattttttatttggaactttataaatcattatttgtttcctttctatctttatattttaataaatttccatttatgtaaattgcctttcgtttgcataaatttattgaataattattcagaataataataaaatcatttaaatgaaaacaaaaagtaaaactctcttaattttgagttttacttttttttatataatataaatactaattttttaaaaagaggaaaggaataaaatgaaaaaattagaaaaaataactccttgaaatgaagattttgcaaagtgatatgtagatgtaattaaacaagctgaatttatggaatatggaccaatcaaaggaactatatattttaaacccaattcttttgctctttgagaaaaaattcaagaaaatttaaataaatattttaaacaacataatgtaaaaaatgtttatttcccactattaattccacaaagttttataaacaaagaaaaagaacacgttaaaggttttgcgccagaattattaaccattactcacgctggtgaaaagaaattagcagaagaactttatgttcgtcctacatctgaagttctctttgcagattgctttaaaaaagaattagctaataataatcaattacctttaatttataaccagtggacttcagttttaagatgagaaaaaaacacaaatccatttttaagaactactgaatttttatggcaagaaggacacacagttcacaccaatgctgaagaagctcaaaaattagctagaactatgattgaagtttataaagactttatagaaaattatctagcaatcccagttatagttggaaacaaaacagaaagagaacgttttgcaggagctgtagaaacttataccgttgaagctatgatgaaagacggaaaggctttacaaagtggaacttcacattatttaggtcaaaatttttccaaaagctttgacattatttttaaaaacactaataatgagtttgaaaatccatatcaaacttcttgaggagtttctacaagattaattggtggattgataatgacacacggagatgatagaggtgtaattattccacctaaaattgctccagttcaaatcgacattttagtgcttttttcaaacaaaaatcctatagtttcaaagacagctcaacaaatttttgagaaattaagaacaaaatttacaccaagaattgatgcctcagataatcaaccaggttataaagcatctagatctgaagttttaggaactccattgagaatagaagtaggtccaagagatttagaaaaaaatcaagtaactttagttagacgtgatactttagaaaaatatcaagtagatgttgaaaaagtgtttgaaaaagtagaatttttgctcgatgatatacaaaataatttatataatcaagcaaaaacaaggttagttaataatcttgacaccgctttaaattatgaagaatttaaaagcaaaatagcacaaaataaatttgttattattccttttgaagcaaatgaagaaatcgaagaacaaatacaagcagaaacaggagctacaacacgttgtatacctattaatttagaaatagttaatgaactaaaaaagattaacaataaatgtttctttactaacaaaacaacaaatagatttgtaatcttcgcaaaagcttattaatatttgttttttaaattataatattagtattaaaaagaaaggtatttttaattatgtcaacaaaaattaaagaaactacaaaatctggaattttcccagcaataacaaacgataaacaagcactagttgtatttcaccaaaaaaattgcggagcttgcattatgctagaacctgttttagaaaaactagttgaaaaaaaagatgtagtagtttataaagtagatattcacaatgatatggaatacacacgtgaagtaggtattcaaggaacaccaactattttagtttacgaatttggaaaattagtaaatacattagttggatatagaagtttagatcaacttttaaaagctttataaaattttaagcattaatacaaaaaaacacttgaaatgaggtggcacccttttcttcaaaaaatttttgagtgttttaattaattataatttgaaatgaatgtttctctaaatttaatgggagacattcattttattttgtctttaattcgtttgtgattgtaataataaatataatttgcaattgctttgtgaagttgtttaaaagttaaaaattctttttcgtgaccataaaaacattctctttttaatgttccaaaaaacgattcaataacgctattatctaaacaatttccttttcgagacatggactgaattattcctttttgttttaatttttctgaaaattgtctatgttgatactgtcaaccttgatcactgtgaaaaattaaaccttcaagatttttgtgtttggaaaaagctttttgaagcatttttctaatttgttggttgttagcgcttgtagacaaatctcaagcaataacttcaccattaaacatatctaaaattggtgataaatatgcttttccaaatgaaccgctaaattcagttacatctgtagttcatttttgatttggttgagttgcgacaaaatttctatttaaaatattgtctgcaattttgcctacagttcctttgtaagatttgtattttcatcagaacaaattgctttgagatcgaatttttccattaatctgcgaacttttttaagtccaattttatagcctctattattaagttcagcttttattcttctttttccatatcttgctttattttcatcaaaaataagcttcatttggcttataatttcttcatttttcttgtcaaaatcttcttttttgagttcataataaaaagtagatataggaatagaaaactcttttaatacttgagttaagcgaagatttttgtcagcttttactctattataaatgttttttattttttcttgccttggttgatttgagtcaaagatctctaccaaggcttttcacttttttagtacttcattttccttttttaaaagtttaatttctttttcaaagttttttttctcttttttaaaatgtttgagttcttctttaagaagtttgagttcttcatatacagatgttagagaattagattgatctttactatttaaattttttgaaacttttgaacgtttatcattaagaatttttgatttcattattggtcttcctttgtttaattctaaaccactaatccccgattctaaatatttttttgttcaagaagatatttgacttggattaagattattttcaagtgaaattttaacaattggttcaccagctaaaaatcttttaacaacacttaatttttgatctatagttcactttttatttcgtggttttttcttaagtccttcaactcctaatttgtcataaattttttttcaaaaatttacttgatttaaaaaatttttctgacttgtattagcaaaatcgggctttttaatttcaattccttttttgtttttttacacattctaatttaaattctaatgaatatttcataaaaaatccccttttctatttttctaagaaaaggggatctgctcatttttttgatgttttttatattaataactgtaatttacttattttttaatgttgaaaaaaactttttcacctttgtattctgcagtagattgaattgcttcctcaattgctaataatctgttgtattttgcaattctatctgttctagaaagtgaaccagttttaatttgacctgcatttacagcaacagctaaatccgcaattgttgtatcttcagattcacctgaacggtgagaaattactgaagtaaatcctgctttgtgagctaactcgattgtgtctaatgtttcagaaacagttccaatttggtttagtttaattaatatagaatttatagcttttttctcgatagcttgttcaagaattttagcatttgtaactgttaaatcatctcctactatttggtgtgttttaccaaattgtttagtaaattcaacaaaaccatctcagtcactttcagccagaccatcttcaacagaaattattggatatttgtggaataagtgtccaaagtattgaatcatttcttcagtggtaaattgaacccttgatccttcaaatccttctcttttttcttcaatagcttttttaagttttttaaatgtataaactccattgtgataaagttcagaagcagctgcatctattgctatagccacagcattttcaccttcttttgctggtgtaaatcctgcttctttgatagcttctactaaaaagtctaaagcttcttcatgagatcttaaatttggtgcaaatcctccttcatctcctacttgtgttccatgcccagcttttttaagtaatttagctaaagtgtggaaaattttattagctacttgtaaagcttccttgaaggtttttgctcctagtggcattatcataaattcttgaaagtctagtgtatttgatgcatgttctccaccatttataacgttcaacataggaactggtaattgatgagcatttgcccctcctaaataacgatataatggaattttaagttcatcagccgcagcttttgctactgctaaagatacacctaaaatcgcattagcacctaaagctgatttattttctgtgttatctaattgaatcatcattttgtctagttttctttgatttaaaacacagtgtccttgaagagttattgctatttttttattaatgttatcaacggcagtttgtacaccttttccaccaaatcagtttttttcataagctgttcctgaatctcttagttctaaagcttctctagtacctgttgatgctccagaaggaacgatagcactaccaaatcctccagcttcagttcaaacttcaacttgaacagttggattacctcttgaatctaaaacttctctggctttaatttttgaaatttttgacattttcgtctccttgatgcttttttgttcttattatatatattttaaaattatattattttttattaatttttaaaataacagttcaaaagaaaatgtataaagacacaaaaatgcttcaaaaatgaaggtaattaactttttctttgattttttataaaaaaaatactgattttacagtattctttagtttcttttttacaaaccatttttttaaaaaaagaaataatctaaaaaaatggggcagatgacggggatcgaacccgcgtatgtcggagccacaacccgatgcgttaaccacttcgccacatctgccaaaagtgtaataaaattatactattttttcaccaatttattaaataattttcaatatttttttgcttgatgtacacaaaaaataaaaatcttggacctaaatttgaagaataaaaaatattaaaatatttttgcccttatttttaaaaatttgctataattttttgctatctatgattattttagagttaccaaacgacattgttaagttatataaatctttaaagttaatgtattgtgcattagctttttatttggttgaagtaactcaaaatactttcgacaagttccccatctctcttcattagagaaggggttgcaatcctttatataatgaagttttaaattaatatcaaataattttttatttttttacaaaattattatattgaaaggtttcaaatgactaattttaaaaaagaagaaattttaatttctttagttgatgtagaaaaagaatttgatggtaaaaaaatactaaatcaaataaatttagacatcaaaaaaggtgaatttgtcactttattaggtccatcaggttcaggaaaaacaacaattttaagactaattggaggttttgagtgaaccactagaggagaaattaaatttaatggtgtagatattaaagacatcccgcctcacaaaagagatacagctacaatttttcaagattatgctctcttccctcatctttctgttaaaggaaatataaaatttggtttaaaactaaaaagatatcctttaaataaagaagaaattaatccattaactttgaagcgtttagaagaatataagaagaaatgaagcctaaaagctaaagaaaaaatggaagaattaaacaaaattcaaaccgactatgaaaagcatattgaagatccaaaagtagacttaaaaaccaagaaaaaatatcaaaactgacttgatgattcagattttaaatattcatattgagaaaattttgttagttccaaagtagaggcatttgaaaaaaaatatctcacaagaaaaataacaaaacaagaaatggaaaaagaaatttccgaaataattgaactagtaggtttaaaaggaaatgaaaacaaatccattcacgaactttctggaggtatgaagcaaagagtagctcttgctcgttctttagtaattgagcctgaaatagttttgttggacgaacctctttctgctttagatgctaagattagacaaaaaatgcaagtatttttgaaggatattcaacaaaaattaggtcttacatttgtttttgtaactcatgatcaagacgaagctttacaactttcagatcgtattgctgttattagaaatggaaaaattgagcaatatgataaagccaaaaacatttatgattatccgataaataaatgagttgcaaattttattggtgattctaatttttttgatgttaaatttctaggcaataaaaaagttttacttttagataaagaaattcctaccattcattcagaattccaaattaatcaagtagttgatgccttaattcgtccagaagatatagatattgacttacattctggattttttaaaggaaaagtaataaaaaattcctacaaaggttcatattattttgttgatattgaagtacaagacaaagttatttatgttgaaacaaatgataattatgatgtaggtcaagaagtgtttttaaaatgagatttagatgcaattcacttaatggaaaaagagagtaaaaatgaaagctaaatcctttaaaaataaagtattaaagttcttttttgactttaaaaattcttgaaatttaagactatcactttctttgccttacattatttttagcttcatttttatagtaattcccttattgttgttgtttataaaatcagttgtttctgttgattttgaaaacaatcatcaaagtgttacaacaaacttttcagttgttagagaatcaagtacttgattaataatttgaagatcaatttatttaggtattttaacagctttaatttgtttagtttttgcccttccttatgctttttttgtttcctttaacaaatcgaaagctttccaaatttattcaatttctctaattatttcaccattagttatttttacaattgcaaaagtcttttctttaagagcactttttgtagcaatttttgacgatggtgatttgaataatcaaggatttatgcttcttgggcttgtatttttaaattttccatttatggttattcctttatatacagtgtttaaagatatgtccaaaaaccttttagaagcttcagctgatcttggttataataagtttcaaactttaattaaagtagctcttccgtatggtttaaaagctatattttcaggtattgctctagtatttttaatggcagcaactagcattgtaatttcagacaaactattacctagtggacaacaaaaccaactaatcggaaacttaattaataacagtgctaatcttacaaatccttttgatttagccaaaacttcctcacttgttttaattacgattttagttttattaggaatttatggactaatttacttcgttccgatagccattatgaaattaaaaggagtaaaacatgactaaaataattgactacatcaaagaaaaagaaatacttaaaaaatcttatgtttgaataattttaattttgttttatattccgataatttttggtgcagtattttcttttaatgctccatcaaaaaaaggttttatttccacaacttgaaatagtttttctttacaagcttttagtgatttagctaaagtttcatttgcttctgctttagtaaattcaatcattatagcaatttctaccacactaatagttatcataatttcattaattacagtttttgcgctttgaaaacaaagaaataaaagtgtaaaatcctatgttaatctttcttcaaatattccattaattaatccagatgttataacagctgttgcgatggcaattattttatccttgttatttggaacattaatagctacaaaagaaggtttaatcagagcaatagtttctcatgttgtaatgactttgccatatggtattttgcttctttatcctagaagtgaaaaattttctaagactttgtttgaagcatctcaagacttaggatacaacaaattcaaaacctgatttttaatttacttaaaatacatgattcctgctgttatttcaacttcagttgttgttgtctttttatcatttgatgattttattattactaaaattacttcaaattcacaaacagtaggaaccttactttatcaaggaacttttaaaacctgagcattattattaggtgctattatgttgattttaatagtagttggaaacgtattttgaattagatataaattaaaaaaagataaaagaggtagaaatgaaatttaagttcaaatctaagtacaaatgaggtatttttggcttcttttttcttcttatttgttcattaatgatagcagcaaaaattcagttaccatttaaacctttgatcatgaattatgaagcttatatttctcaagcaggaagagaagaagttgaaaaagacttcgattatagagaatttggtgatgtttccgaatttaccaaagccattgaagataaaagaacaataggaggtgtaggttctgattttcaaattgcaagattagtacaaaaaaacttgattcaaaaaattgattgatataaactttttgaaaattcagaaaatgaaaaattaaaagaaggttttcaaacacctgaaaattatttttctttaaatcaagaacaaaaaaaggctgttttatcaagaaaaagaagcacttttgaatctttaattagaccagaagtagtaaaacatattgatgaatatgatcaatttttagtagataaagaaggaaacaaaatagatacagacaaagatggaattgctgatcgtttttgagaattttttatcccatattacacacaagataaagtaattgcttacacaataggtgattacgaaaaaaataataaagtttatgacataaaacctgagcttgcaaaaaatcaaaaatataaagaaaataaagaacagattcaagacaaaggaattgaatttttagatcagtcagttgcaggaattggaaaaactctaagagaatatggttataaatatttcgaatgaacagaagctatgagagataatttattattaggttcagaaaaagtaggaaattattctggggtagttactaaagataattacaaacaacaaattgatggatttgtaagttacattaaagatattactggcaaagactttgaagacttaaagtttaattactacaattcttcaggacttgaattagcaacaactttaattgatattgaaaaaaaaccagaagttggttttatatataatggagatgcgttggatgctcattatagtcaagataattttgaatgacttgaagatggaaaaactttaaacattattagacctaaaaacaatctaacattattagatggttgaataatattaaaagatgtagaaacaaatgtagtaaatcaactatataaaactttatacaactcagtttacaaaggtgaagattattcaaaagaccaaatgctacaaatgtctttagaaaaaacaaaatataaagatgaaaatgacaataaattcaaatatggttatgttttaaattttgagaacttacctaatttggcaaattttgactttattaactatacaccttcatttataaatacttttgagttttttaaaaagacttattttaatgatgaagtagagactattaaacttttagatgaaaatgataatcctacacaagaagaaggatttttgattaaagatgaaaatggaattgttcaagccacagaacaagatccaacattaacttttgatcaattagttgcaaaagcagaagaaagatcttcattattcggattaaatatttacctttcacagcaaccaaaacaaacagtttttggtcagagacctgaagattttcctgaagacccaacttttgacattcactattcttttatagctccagttgacgaaaatctagattctaatattagaacttattacaatatgaaaacaaaatcttaatttttatatataattaaatataaaatttaaattaaggaaaaaatgttaaaagaaatattgttaggcataattatcatcttttcagtttgtataatgatactctcattattaatgtctccacattcaaactcattttcaggagctcttgttggatctagtgatctagatttatttaaggtttcaaaagaaagaggctttagaaaatttaccaaatgagcaatgtttatttgtggtttgctatttttaacacttgctttaattattagattattataaaatccaactaaattaggaaagtcaaaaatgcaaattagtaatgaacaactgtttaactttttaaaaaaaccaagaagttttattgaaattgcaaaaaaattcaatattttttttgaagaaaaccctcaattaacaagctttttatcacatttagtagaatcaaatttaatctttaaaaacaataaaggactttatttttgtccaaatattttaagttcacatatcggaatttttagagcaacccaaaaaggttatggatttgtagaattaaaagaaagctccgattctgtttttattccagcaaaatttactgcttcagctcacgatcaagatgaagtaaaaattaatgtttatcaagatgaaattaaaagtgataaaacttatggagtagttacaaaaataattactcgcaagcttaaatttttaataggtaaagttataaaaaatggtgattattttgattttgaaccatataatagcttgaaaaatgaagtattttttagatgagtttctacaaaagatttaattttaaatgagtatgttaaagttgaaattgtagaatacagtaagaatatcttgaaaatagctttagttaaaaacattgccaatgaaaaagaaaaattctgatatttacaagttccactagttgaatccggagttgaaattaattttccaaccgacgtagaacaagaattagctcaaattccagattctatagctaaaatagacgcagatagaattgatttaagatcaaatacaattgtgactattgatggagatgatacaaaagattttgatgatgcaatttcagtagaaaaacttgcaaataacaactacagattgggtgttcacatagcagatgttagttactatgtaaaagaagatacatttttaaatgaagatgcagctacaagaggtacttcaatttacttaccgaacatggttattccgatgcttccagaaaaactctcaaatggaatttgttctttaaatccaaatgttgatcgatacacaattactatggaagctgaaattgattctcaaggaaataatgttgatgtaaaaatatatccttctgtcataaattcaaaagctagattaacatataatcaagttaataaatactataaaaatgaagaaaataattttacaaatgaagtaaaaacactgttagataatgctttagaattagcaaaaattttacgaaaatataaagaaaatcaaggttatgtaaatcttgatattgaagagacaaaagtaattttagatgaagaaggttatactaaagcacttgaagttaaaaaaacaggaatttccgaagctttaattgaagattttatggttagagcaaacgaaaatgtttctgaatatttagccaaaaagaaatttccactaatttatcgtattcatgataaacccgatgttgaaagaattgaagaatttaatcgagttttaaaatctttaggtgtaaatgttgtcattccttatcaattaagttcaaaaacttttgcagatgcagtagaaaaaataaaagaacaaagacttgataatttcattaaaataatgattttaagaacaatgcaaaaagcagtttattctccgataaatcatgggcattttggtttagcttctgaattttatagtcattttacaagtccaataagaagatatcctgaccttcttttacataggataattagacattttttatttgaaaacaaaaaagatgtgcttcattttgaaaggattttagaacttcagtcaaaaactacatctgagcttgaacagcgagcacaaactttagaaagaaaaatagtttcaattaaaaaaacagagtttttttcaactaaaattggagagaaattcaatggacaaattacttcaattaaaaagtttggtttttttgttgaattagaaaataatgtagatgttttagttcatatcagcgacttacaaaccaatgaaaaagaagagtttgttctttcagatgatggttttactttagctaataaattttacaaataccaacttggacaacacattcaaattgaaattttaaatattgatattccttttggtaaaatttcagcaaaagtagtgttaaatgagcaaaccaacaacaaataaagaaaggacaatatagtggtaaaagttttttataaatttagtttaactttaatgtttaagtctataaaaggactaatgctgttgctcttacctttttttctaattctaattttggaaattttgtttatccaattagtcacaacgggaattgaaccaacaaaaacagattcaagttcaaattttagcgctgaatttcaagcacagcttgcgatacaaaatatttttgtaattccaattattttagtccctaacatatgtttattacatttatttttatgaattatttcacaatttaaaagaaattcttatctgtacaaattttttatttatcactataaagattatagttatttgttagtttgattatttttcttcgtagttatttttatattcaattttgcatttttctccttgttaatagccttttctaaaataagatcatttataccagtaaattttgtttacatgtttgtaacaccatttttaatttctttatttttttcaccattacctttaatttattttgttatcaaagcaaaaaaatactgactttttttattaattttttacattttattttgcggattatttttaataggaatagcactaaaaatatttttacaaatacaacaattatttggagatagatattcaaaaagcacagacacttttttaaatgttttaacttatttagtacctactaattttttggttagacctgtagaattgctttttaaagacactcaacaaaattcttattttaatttttttagccagcaatgatttaattatgttgatgtaattgtttatccgatagtattagtgagtttgaatgtttgtgttttatctactaatttaattaaaggagcaaaatgagtaaaattcaattaaaagcagttaatgtttcaaaaacattcaagaaaaaaatcattttttcaaatgtgaatcttgagatatatgaaggtgattcgatagctattttaggaagaaatggaaaaggtaaaacattgttgttaaatattttagcaggttctcaagaaccagataaaggttatatagaactttttaacaacgatccacaacatccttgagatcatattggttatttagaacaacaaggtaaaagagtcaataatataaaagttaaagattttttagcagtagttcaactcactttgcttacaaaggaagcacaagaaaattatcaagatttaatagaattacttgcaatagaaaatatttttaatacaaaaatagctagtttatcaggtggggaaaaacaaaaattagcaattttacaattatttttaaataaacctaaaattatttttttagatgagttatataacaatttagattattttataagagaaaatttagttaaatatatccttgaatataaagaaaaatataatgctactttattatttgtttcacaccataaagaagaaattttaagattagcaacacgaatttgactactagaagatagctcaataaaagtaaatactaacgatatagaaggtttttttaaagaagataataaaaacaatatttttatataacaaaatttaaaataaggagtattatgttgaaattatttaaaaaaattaagaagaaaaacattcttattttgctaacttctttttctatcattgctttatcttcgttatcttttatagctttaaaaaatagatctacagttaatttagaaacagaaaatgtaaaagtttcagatataagtaaatttagtattggttataaaatatctgaaaatacaaaaaaacattattcatcaaattcagaccctaaggatcaagatattcatattagttcaacagaaatacttcaaaaagaagcatataaaatgataaatggtgagtatcctaaatcaaacgaagaatttgctaaatgaaaagctaatttaagacaaagttataatactgatatagatggaaaagatacatttattatacagaatcaagaaacctgagatttatgaagtcaaatttattttccagttttaaaaaatataattaaaactcctgattccttggataaaaaaattaaagaaatttctgaaaaaattaaagcaagtaatacccaaaacaaaagcagttcatattttgataaaaaagatttacttatttatacaggattttcttttccatcaaattgaactacatttgatgacttacctgattttcaagtttcaaaaattaaacttaattctaaaacagggaatttagaactttcaattataactccttctgatcttagagcaacaattagaagaagcgctacttctacacaacttcctgcttcatttatttttaacatctttgttttagaaatagaaaaaccatcacaaacacaaggacaaaatcaaaatcttccacaaatcaaccaatatacccgaatagaaccagtttttgttgcaatataatttacttctttgctacataaatattaaaatttccttcaaaatgaaggaaatttttttaatttctttttggatttttaccaaaatgaaattaaaaatttttcaataatattccgaaattttctaacttttaattatctttttaaaatgtaatataatacaaatatttaaataaaaattttctacacaaaagcttttaaagtagaaaagaaaggaaaaatgaaaaaatttgcaagaacagttttaggtgatataaatcctagccaattaggtgtggcagattgccatgatcacttaattaaaaattatggaccagaagcacacgagcatccagatttcataatgatgtctaaagatgctgcagtaaaagaaatgcttgaatatgtagcaaaaggaggaaaaactgttgttacaatggacccaccaaatgtaggtcgtgatgtataccaaatgttagatatagcgaaaaaattagaatcaaaagctaacattattatggcaacaggatttcataaagcagctttttatgacaaaggagcttcttgacttgctttagctccaacagataaaatagtaaaaatgattgtagccgaaatagaagaaggaatggatgagtacaactacagcggacctgttgttaaaagatctaaagcaaaggctggaattattaaagcaggaacaggctatgcagctattgatcgtttagaatttaaatcattagaagttgctgctagatcttcaattttaaccggagctccaattttagttcatactcaattaggaactatggcttatgaggctgcgcaatatttaattgattttggtgtaaatccaagaaaaattcaactttcacacttaaataaaaatcctgataaattctattatgaaaaaatcataaaagaactaggtgttagtctatgttttgatggaccagatagagttaagtactatacagattctactttagctgaaaacatcaaatacttagtagataaaggttatcaaaaacacattactttatctttagatgcaggtagaattttataccaaagacattatggaattgaaaaaggaaaattcacttttggactaggatatttatttgatcgttttattcctttattaaaacaagtaggagtttcacaagaagcaattgatgatatgctaatcaacaatccacgtgaaattttaacctttgatgaaaaaagagaatttaataaagattctttaccacaaagagttttagatatcaaaaagacatttaaaatctaatttatacaataaggagcttcatttttaaacaaatgaaaaagattaatttatccagcaagaaaaagtttttaattggttgacttgcttttttagtggctaatttaattataattttagtaactttattagtaaaagcagctaaaccagcaataggcattgaaccttgatcatcacaagcttgatctggtgctggacttttcttgattaaaacagtttatgtttcaaactttttagcaataactccgattttattagcgaccatagtttttacgggttatatgataataggaagaggaatcaaggattctttccttggagcattaaaaacagctataggatttttacttctaggtataggttcaggagctttagttgggcttgcaaaaccagtatttgaagctgttagaaaattaggttcttcagctgaaattattcctttagatccttatttttctttatcacaatcacaagattttttagctcgtatttcagaggttattaaaccaggaattgattattcttctttatttacttttactttattaattgcttttatagtaaacattatatttgtagcaggaaaaagatgaactaatacaaattcattaatgattacagggcatattatgcttcaacaatcagctgttgttacttcagttttatatgttttattatttagacaaattccaattgtagatggcgaactttcagctggttcacaagcaggtttagttctaatttcagggctatttttaggaatttattgagcaactgcaactactgctactttaaaaccgactaatttagttactcaaaatgcaggatttgctgttggacatcaacaaatgctaggaattttaacttcatacaaactaggaagattttttggtaaaaaagaagatacagccgaaaatagaaaactaccttcatatttgaagatttttgaagacaatatctttactcaaactttaattatttttgttttatttgttattttatttattgttatcattcaaggatcaagcaagccagttttaaatgaaaatttaataggctttactaaagattcaggactttcttcttgaaatggaaacttatatggaggagctaacttcatttttaacattatcggaggagcacttaaaatagtagctgctttattagtaataataacaggtgttagaatgttcattacagagcttcaacaatcatttcatggaattagtgaaaaaatcattccaggagcagtagtagctgtcgatgtggcagcaacatacgggttttcaattaactcagtaacatatggatttgtttcaggagtaataggtcaatttttagctgtaggaattatgataggagtttcagcaattccaggaaattcctactcaaatatagcaattccattatttattactttattttttaactcaggatcattaggtatttatgcaaatgcatcaggaggttgaaaagccgcagctattgttccaggtttaataggatttttagaaatcataacaatttcctttgctactaaatttttatctaatgtagccatagcagatggattaaataatccagtagcacaaggttatattggaatgagtgactgaaacttattctttggattgctaattatcattggggcttattcagtaccggttgcttgaatttttgtttttatagcaattactgcacttattttattagctcagattatagactctggaaatcaaaccaaaaaaactcatttacaaaaattatttaaaattaaagtagataatttagaacaagcatttgaacaaagtgcttaaaaaatatttagtaattgttaaaattattctaaaacactataaaaaagaaggaaaataaacacaagatggcaaatttaaaagtaatcgcagcttgcggtaacggtatgggaacttcaatgattattaagttaaaagttcaaaaaattttaaaagaattaaacattccagcagacgtagatgctttatctatgggtcaatctaaaggaatgacaaattcagtagatattattatttcttccaaacatttaacttcagaatttgttcaaaatcaaagagcaaaaattgttggagttacaaatttaatggacgaaaacgaaattagacaagctttaaaagaagctttaaacttagtataatttggataattatggatttattacaaacattaaaaaaatttaattcaattagattaaacctagaagcaacagattgaaaagatgcaattagattatcagtagaacctttaattgaaaaacaagcagttactgaagattattatgatgcaattatagaatctactatcaaaaatggaccttattatataattgcaaacgatttagctatgcctcacgctcaaagcgatcgtggagtaaaagaaaattcgttttcattaattacattaaaaaaaccagttttatttgatggtgataatcgtccagttaaaattttaattacattagctgcaacttcacctgaaattcacacttcggttgcgcttccacaaattgttgctacttttgaagacgaaaatgtagtaaaacaaattttagatgctactaaagtagaacaagttgtcgatattatttccaaaatagattttaaaaaatacttaagttaattttttattttaaacaagttggtgtcgcaccaatttgttttattttcttcattttgaaaggaatttatgccattaccattattacaaatcgctttagataatcttacaatatctgaagcgattgcttctgcaaagaaagcagaaaaatatattgatattatcgaagtaggaacaattttactagcttcagaaggaaaaaaagcaattgttgaactcaaaaaagcttttccagacaaaattatcatcgcagatggaaaaattgctgatgcaggaaaagttttttctaaaatgttttttgaatcaggtgctgattttacaactgctatttgtgctgctgaaactccaactatgcaagatattttagattatgcaaaatctttaaatcaaacaaataaatttgcaattaaaaaagatttacaaattgaaatgacttccaatttttcttgagaacaagtagaaaaatgaagacaaattggagtaaaacaacttgtttgacaccgttcaagagatttacaagcagcaggtaaatcttgatcagaaaaagatattgaaattgtttccaaacttgcttcaatgggatttaaaatgactataaccggcggtgttgaagtaaaagatattcatttatttaaagatattcctgtatatatttttattgcaggaagatcgattagagatgcacaaaatccagagttagcagctaaggaatttaaagatgaatttaaaaaatattgatgaaaataaacattttgttggaatttatgaaaaagcaatagataaacgctatagttttgaagaaaaaatagagattgcaaaagaagccggctttgatttcatagaacttagcgtagatgaatctgatgaattttctgctcgtttaaattgaactgataaaagaataaatgctataaaaatgaagctaaataaagaaaaattctatattaattctatgtgtttatctttgcatagaaaatatccgtttggttcagaatctgcaaaaactagacaaaaagctttacttataatggaaaaagctttaatactagctaaaaaattaggtattagaattattcaattagctgcttatgatgtttattacgatccttgacataaacaagctgaaaattactttatcaaaacagtaaaacaagctgcaaaattagctcaaaaatactccattactctcgctttcgaaacaatggatactaaatttgcttcaacaattacaagatgtttatatttgattaaaaaaattaatatgcctaatttatttgtttatccagatttaggaaatctaaacagattttcaaatgatatcgaaactgaaattaaactaggtcaagataaaatagtagctttccacttcaaagatacattagaaaatacctttaaaaatgtagactttggtcacggtgatgttgattttgtcagatctttaagagctattaattcaatagattatcaaggaccttttttaattgaaatgtgatataaggaaaaagactttgatttaaataaaacactagaagaaaataaacaagtacaaattgataatataaaatcagcaagagaatttttcttagataagctaagaaaggcaaataatgtttaaaaatgaagaaaaaataaagaaacttaaacaagaagtatacgaagcgaatatgctactttataaatataaattagcaattcatacttgaggaaatgtttcagcaatttcggaagatagaaaatttatggctattaaaccaagcggaatttcttatgaaacaatgacagcagaagatatggtgttagtagatttagaaaataatttgcttgaaaataaaggaattaatccttcttctgatactccaacacatactttgttatacaagcaagattcgcgaattaaagctattgttcacacacattcaccatatgcagttgcttgagctcaatctggatttgatattccttgtttaggaactacacatgctgataatttctttgggtctgttccttgtgctagagaattaacagatgaagaaattaattcaaaatatgaacataacacagggaaggtgattatagaacattttttagaaaataagatagattttattgccactcctgcttgtttagtaaaagaacacggtccttttgtttgatctgctaaatcagctactgatgcagtaaatttagctttaacattagaagaaattgctaaaatagctttatttacaaatcaaattaatccaaatatgaagcaagccaatcctacattacaaaataaacattatcaaagaaaacacgcgaaaaatgcctactatggacaaaaaacaaataagctttaaaaatatagtatttgatcttgatggtacgcttttagataaaaacaaaaacatattagaatctagtaataaaattttaaatcaactaaaaacatcaacagacaaaaagctaataatagcaacaggaagaccttgatactttacaaaaaaatatattaaattaattcaacctgattttcctatagtttcttgtaatggttctttaatttatgactacaaaactaaaaaagtcatttacataaatcctatagaaaaaaatgttgcaaaatcaatatttgaaatattaaaaaaagaagaaattactttcttaatttattcagatcagcaaatttatgctttttcaaaaaataaagtcaaaaaagagtgatttacttgactagaaaatactcaaaaatccttagaaaatgaagaaaagtttgatattaatttctttgacacacaagatttaagttttgatattaatgctttaaaagttgtcaaatttttattaattaaaacagattcagatcttaaaaatgtaaataatgcagtagaagaatttaaagactttcaaggaatttatcttctttcttcttcgccaagagttattgatattatgccagaaggaagttcaaaaggtgatgggcttgtctttttaaacaaagagtacaacttagatttaaaaagcaccatttgtcttggggatgaagaaaatgatgtttcaatgtttaaagtttgtaagtactcagtggctatgggtcaatcacaagaaaaaataaaaaaagaagccactttttcaatagaagatcacaactcagatgcaatttataactttttcaaagatataatttaaaaaatgaataaacaaataataagaaaaattagagttaatcaccttttagatggatattgaattatgccatcaatgttttcgattcttactcccagaatttcaaaatatattgttaaaaaagcaaaaaccttagatgaaattatagaatataacaatctggaaaaacaagaagtcattttcagctttaataaagatacagaatttaaaaaatttaattatttgctaaaaaaaagagaaattgattttgtactagataaaaaaattgttaataatttaacaaaagagactaaatttgagtttgaggtagtacccaaccttacaattattttaaactgaaaatcaattaaatcaatttacaacggcttaattttcttctttagtaaagaatattttttaaaattattagttaaagaacaattaagaactaaaaaagaaaaaattagtttattgtgaacttcaatgggttttaaagtagtttaaaaattatacaagcaaaaaaaaaaaaaaaaaagaatattttgcaatttttgtaaaaatgatgtaaaataattctgtttatataaacaccattaaaaaaaccaattaaaaattaggttattttaataaaagtataagttcacccaacaaccaattttattggttgtttttattttctaaatttaaaactaataaataaaagaaaaggttaatttaagttctaaataatgatgaattttttttcttaagtttcttagttttatttgcttttaaaaaaatatttcacaaattttctcaaaaatatttatttatttttataatgtagtaagaaattttttaaaatgttattttaataaaacaaaaaaatttcaatctgtactaacaaaggagataaatgaacagaataaaatctaaaaagtttttaggttttttaactgcattagcaatcccagctgtttctattgttgctgtttcttgtggaccaaataactatacttattcttccaaagacgtaacacttgctaaagatagtaaaacatttgctgatggtaaaaccaaagtagcagatgataacactaaagcaagatttgaaattactatgcacaacattgttcctaaactttttgatggaactgcaatagatttaagtaaattagaacttgaatatattcaatttccacataaaatcaaaacaaaagatggtaacgaagttaaagatctcaaagatgttaaagataataaagatggtaaatatgttgtcgaagttgaaggtgcagtaggttctgctttcggtagaacagaagaacaacaaaaagaaaatgctaaaaacattaaagttgtaaaaaacccaactgttgaccaagataaaagaacagttactttcttacttgaactacctttagaattagttgaagtaccttataattacagagttgtagttcctgctccatcaactgataaaaaagcaacagtgttaggtggaattgctttacttaaagttccttcaaaagattcttataacaaaaagataaaaagttagaagctaaaaacgaaagaaaagctacaaaataaacactaattaataaaaaaattaaaaattttaaaaatatttcgaaaggaaattaaatgcttcaaaagataggtttacatcctcttgattgagctattattgccatttatctaattgcaattttaggaattggtttacttttctgatgattacaaaaaagaaaaaaacaatccaactcaaccaagcactttttcactggtggaggtaaaaacccagtttgagttgtaggaatttcaatttttgcaaccattacttcctcattattctatctaaatactcctggtacagttatgggttcaagatgagcttgaatcggttctaatatagccattgtagctatgatacctgtagttattaagtgagttatccctttttatagaaggatgaaagaatctacagcatattctttcttagaaaatagatttcactattcactaagagctgtaaactcactaagttttattatttttcaagtctttagagttgctgttgttttatatgttccaacactagctctttcagttattattgatattagtccaatttgaattttaattatcgttggattagtaacggtagtaataacaacaattggtggattcaaagctgttgtttgatcagatgcaatccaaggtattgttttattaggaggtattgttttagttattatcattggattagctagaacaaactgaggttctgatacattaaaataccaccaaattttagatgaaagttcatttaaaccaacactagtgttcccaggtattataatgttagctgtttataatacaattaactcattatattcatttatgggttcacaagacgtaacacaaagatataaaggaacaaaatctgttcgtcaagtacgtcaaacattatgaattatgttctgagcttcaatagcaacaatgttattattcttcggagctggttcaattttatatacatacttctcatcacaaggatactacgttgataatacagtaggaagtggaattaacaacatagtaggtacacaaggatcaggtcctgcattcttctcattcttcattgctggttcattaccaatcggaattgtaggtctaattctttcagctattttcgctgcaacacaatctacagtttcttctggactttcagctttatcaaactcaatcgtagttgactttatagcaagatttaaaccaaatctttcagatagaaccttaagcttcatttcaaaagcattagttttattcttcggggttttaggaattttattcggaatcgttttaattgcaacaaaacaagacgacttatttaactacttcaccggatttatcggtctactaaatgcgccaacgattgctatattcttgttaggaatctttacaacaagaactaactgaaaaggtgcattattaggatttacagtagcaacagtagttggaatctgtatttgattaccaacacaaaaattcatctcaccaagtggagcagtgttctcatttagtggtgcatgattaacattaattactttctcagtagcattaggacttggttacttaggatcactaatcttacctgctgaacaaaacgatttaacaaaccgtacatactgaacaagatctaaagaatttattgatttaatgaatttagaagaagaacttgataaagcagaaaaaagaaaagatgaaaaagctatacttgaattacaagtacaagttaaccatctaacaaaagtagttgattcacaaggataccaaccaaaaacattgggaatataatttaatatgatttttgatagactagaaaatatttcaagatataaagggattcataaaaatttagatttagctattgactgaatccaaaaaacagatttaagtaaattaccaaaagaaactttctttttaaaagataaagacatttatgcttttcatgctgaagttgacagctatgatgaaaaaagtaaacaatatgaaacacatcaactctatgctgatcttcatattattattgatccagaagaaaaattctattttgcacaagaatctgatttagcaaaagcaaaaactgagtataacaaagaatctgactttactttatttgaaattgataatcaagacaaaaatttattacatcctagtacaaaagattttctatttttctttccaaaagaaggacatgtgccaaaatatattggatacaatagaaaattaaataaaattgttattaaggtaaaaatagattagtaataattaataatataaaaaggtaattaagactttcttaattaccttttttaaaaggaacactatggaaaaagaagtaaaatttattaatttatatgacaatgaagtagaatatgtttttataaaatcaaaaacaaattcaaataaaaattttatttttgtacatggttttacaggaaattttgatagactttttgaactagctgatcatttaacagactataacttgtatggattaaattttcccttaagcggaaatacaaaatatagttcaaaagagcaggtaagtgtattttgatacgctaaattactatctgaatttattaaacaactaaatttaaaaaacactacattatttggtcattctatgggtggtgcaactgttattttagcttatccagaagtaaaagattttataaacaaacttattttagttgcacctgtaaatcgtacttcattagtacgtgaatctatgtttaaaaattgatttattaaacctactttagaagcaagagaacatgtaataaataatatctatcacgatggaaaagttttctgaaataaagcacaaactcaagaaaaagcacaagcttttattaaaataatgaaatcaaatatggactttaataataaagtatctaatttaggtcttgaattaatttcagaaaaattatttactacattagaaagcatttttcctataattaaagttcaaacagttttaatttacggaacatcagacaaaattattgatgctgaaaatattcaagcatattatgaaactttaataccaagtatttatgtaattaaattattcaattcaggtcatattccttgagaagaaacacctaaagagttttttaaccagttagcaaaaatcctttaaaaactaacaaattacttttaaaaaacagcaacaaaaacaatttgttgctgttttcaattttatacttaatttacttctttttagaagcaaatttgattaaaatatacagctatttttaaaaaatttgtctttattcttttagtatctaactaaataaaattggcgatacttttaaacaaaaccgtttaaatactgacgaatttttttgctacatataatttaaatattaataaattgaattactatatagctaatagattttgttttaaaaataagaaatatattactttataaatcaagttaatattaaaaaatatattaaatttatataaacaagtttaaaaatttctttataattcataatatgaaaaggtttaagagtattgaattatttgcaggagctggtggtctagcgctgggtttagaacaatctggatttgaacatatcggattattggaagtcgataaaaacgctgcaaatactcttaaatttaacagacccaattggaatgttttacaagaagatatttcaaatgtatcaacacaaaatttattagaaatatttaatataaaaaaatatgaactagatcttctctctggaggggctccttgccaatccttttcttatgctggaaaaaaattaggattagaagatacaagaggaacattattttatcattatgcttcatttttaaagcaattacaaccaaaaatgtttttatttgaaaacgttaaaggcttactatctcacaacaaaggactcgcctttaaaactattaaaaatgtttttgaagatcaaggttatacaataaaacacgaagttttaaatgcgttagactatggagttgctcagaaaagagaaagattaattgtagttggtataagaaatgatttagcaacaaaattaaactttaattttcctaaaaaatataattatcaacttaagctaaaagatatattacaaaacgtgccaaaaagtgaaggatcttcatattctgaagcaaaaagaagggttttcgcattagttccaccgggaggatactgaaaagatatagatcctgagatagcaaaatcttatatgaaaagttgttgaaatatgcaaggaggaagaacaggaattttaagacggctaagtctagatgagcctagtctaaccatattaactacttgtcaaatgaagcaaacagatagatgccacccaacagaagtaagaccttttaacattagagaaagcgcaagaattcagtcttttccagataattgattatttaagggttcaatttcatcgcaatatagacaaataggtaatgcagtaccagtaaatttagctaaagaaattggtaaagagattataaaaacgttgaaaggtataaaatagtggaagaatttgttttagacttcatttccaaagaaaattttgaaaaacatttgctaaataccatacatttttacaaaaaatctttagaaaacatagattttaaaaaatttaattccaacaaaatagatccaataaaattagttttggataaatatattttccaaaaatcatataaagaaataatatctttagaaattcatagacaaaaagataaaacaaacaacaacctattaggatattttcatcaaaatatttttcattattttgaaaattgttctgttccaaagcaaggctgagatattatttgcaaagtttctaaaaatacttattttgttgaattaaaaaataaacataatacaatgaattcatttggaacaattaaaacatatttaaacatgaaaaatgctttattaaaaaacaacaacaacaataataatatttatgcattagtagaagtcattgctaaaaaatcacaaaatatcccttgaattatttcaatagatgattctaaacaagaaataaatgaacaaataagaaggatttcgattgacagattctatcatttagttactggtgatgcgtatgcattttctaaactttgtaaacagtttttgataactttaaaagaactattaattaagaataaaataacaagcaaattaaaaaatacaaaacaacaagatattatagatttttctatttctgatgcagagttagaaaacaatttatttaaaatagcattttcaacttatttaggatttaataaaaatgaagattaaaaaaacctcctatcataaataataagaggttttttgattaattcattaattttattaatctttatcatttgatttattttggtgtctaaaactttttgattgtagattttcaaattcttctgcaagatcaggatgttcttttttaagcactaaaatttgaaattttctataacgtgtagtagtgattagaaatttaataattaatacaacaagaactacaaagcatataaaactaaaaattactaataataaatatacaatagtaattccatcaactgcgcttgcataatttggtagtgcaaaagttggttccataatttatctcctttcaaatttttttaagtttttttatttatataaaaaacttcttagaaattatatatatatatatatatattccaagtaattagtaaaaaatagcaactaatgtaaattacaaaaataatatattttaaaatcaattatttcattttaatgtaaatgattaatgaattaataaattttttcagaaaataagtaaatttaaaaaacacacacaaagtgtgtgttttttaatagttttagtttaattactttttacttcttttggatcgtattttcaaataaattcttgtgtattatcagaatatgtaatttttagatttaaagaaataagttcattaatctcagatttattttgaacaacaacatcaatttgtttaattttgtcattaaatttgtctttaatttcgtttattttagattgttcttttcagttttctgcgctaaaagtttcacgtggattaatgcttaaaagaataagtttttgaatttcttctatactttctgaatttaaattctcattgttatttgctgtaaattgatattgtttaatttctttagaaaataaaaataattttttaaatagtacttttacatcgtccttaaaatttaagttaaataataatgatttaattatatctactttaggaattacatcctgaattcggttttcagcttgtaatcttctttgatatgatcatcattcattagcaacaattggcaaatgataagcaataggttgaattggtagataaaaagccctttcttcagaactaatgttattatcatctaatatttttctaatttctaaaagtattttcgcagtatcatcaaaatatttattaaattcttctgcttgtttttcatctaatttatctaatctatcttgaaattctttttttgcttgtctatctttttttatttcttcatctagagcaaaattatttctacggtttccacgactagttctgaatttgaatcctgaaatgatagattcaatttggtagagactttgttcaatttctctttgttgctcagtttcagtaaatattttattattatctgtgtatagcttagttaatttgtcaaattgaggttttaataagttgtctaatttatcatttatttcttttatttgttctttagaaaataaagtaggttggtttaaaaaatcttctgcacttaaatcttgatatttttttaagtcaggatttttttcaaaaaaatctttttcttgttgtgcattaactttttcttctcacacctttgaataaatagaacttaattttgcgccttgctcttgaagcggttgtaaaatagtttgagcagtgtttattaacttcaatttttcttcgttagttatattagaatcttttaatttatttattaattcttcattaatttgtttaattatttcatcaaatttatttttctcttgttctactcttgaatcagaaacaacaattttgttatctttttcatcttgagtctttgcttcgtttagtaattgtgtatctttttcgttttgttgatttagttttgaattatcaccaacaacaatacctttaggctgtttgtctccattttctgtgctcccacaagaaattacgaacaaagaactactaaaaactagtgccgataaaggtaataacaacattttcttttttaatttcatcgtttaattatacagataaaaaataattattttaaattagcgtactttttcttgaaatttaaaagaaaagtaatagaaatttacaaagttaaaccaaaatttgtcttttactatttcaaatttataaagtcttacagttattataatttttataaaaatctttcaaaatgaagcatatttgtattaatttaaaataaaataaagaattacagagataaaaatgagcagatccccttttcttaaaaaaatagaaaaggggatctgctcaatataaaatcttgtttttgatcttgttcttttgatttagaaaatttttctatttttttctacaagataatcaaaactttgttttattttttcaaaattattaaagaaccgatgctgtttataagtatttatcaacttaaagttattatcaaaattagtttgtattttttgaaaataataagtattactttttaaattgctcttcatacaccctttcaattatggctctagctaaagcaaaagtaattcttcttcttcttctttttccttccttgttatttcctttaaagggtgaaagtaaaatatcatcactttgttttcgaattaaattgactaagttattacattcttgaataaatttatgcttcatttctaaagtaaaatctatattttttaattcaatcaaagtaaaatgtcttgatgaatgttttaaatttttctgtcaatcataatcaaaattttcttttaaatcaaattttatttcgcttccaggtattgttccatcaatgcacttaagcgccaatcaagtatttaaagaattaaactttatgatttgagtttttttgtactctaaattaaagctaaaaattttttttaaattattaatatatttattatttttgtatattttaatttggctatattctttttctttgttatcaaaacaaactacacatacaggattttctgtgtctaaaaaaggattatcttcaataattgtaattgaaactaatttattaaattgcttaaaatttgaatgaataaaggactcaggaacaattgcaactacataatcagaagcttctaacattttttctagagcaattaagtaagtgtcttcatatatagaattttcaaagtatttgtcaagcccaagttgttttctagtagctgaattttttgcaacataaggcggatttgtaattattattgcatcttttattttaggaatttccttcaaagaatcattaatttttcaacctaaagtcgggtcaatatccaaaccaacaatttccttgtttaaaaaggataatgcatcaaataaatcaccattacctgcaaatggatcataaagtattggcttatcagaattaataataaaatcaactatgtgtttatgaagtcaagagtgtttttttgtaaaaaattgacccatttttgttttaaaatgctttatttttgaagggttttgcatattatttttcgattttattaactcctattctttcaattatagtttctgtagttttaaaatgatacttagcattttttcttaaaaaatcaagtgaatgtttctgtatttctttcaaagaataatttactatattttcaataccagatgaaccttttggaaaaactgtttttcattttttctcgcgttttaacatagagatagtaaggctatattttgcgataatcgaagctgctgaagcctgctttattttttcatctgcttttttaattaaggtgagtggatgttgttttaagtttcaatgtttaacatttaaattttcataaatctttaataaataagattcaaaagtctctttagaaacaaaaccatcaataataatagcttcaggatttgtattttgaaaatgttcttttttcaactttttcaacatttttaaatacaaaatagttttaataacatgtgaattaaaaccttgatcaattaataaattgtatttttccatatctaagacaataacttcaaatttaattttatttataatttgattatataaattttctagtttaattgcagttaaagtcttagaatcttttatttgttctaacagctcagaatctaaatcactttctctaaatagtgtacaacaaacagttaggtttgtaaagtattcaccgacccccacttcatcacaacctacaacataactatctttgtttattgaatttaaaatgtccattttcatcctttgtaattaatctatctgatattataaagtattttaagtcccaaatatatgctctattagaaataaaaattagttggtttcagatgtttataatgtctatattaaatttgttaaaatattttttaattagtactttttctttattaaatctcattttttcttctttttctatgtattttccgacaggtttttcaaaaggaatataaaaaactttttgtcaattaatttctttgttgcagtctttaatataagaaaaacttaaaagttgctgaattcaattattattttctttagaatcaaaaattattttgttattttcagcatacaaaagagctggataatctttatttacatctaaatttgttaaatcttgattagaaaatacaacactatcttctaagttgtttaaaaaatttgctcatttaggcaaagtatttccataataaataaaaaatttattatgattaaatttaagaaaatctttaactagtttttcttcattgttgtcaagaaacttttgactaaaaaccttcatttttgaagctaaaaactctttttttgtaaataataactctatttcttgtaaagtattatcttctatatttttttgctttaaaaattttaaaaattcttttaaatcaaaagtagatttagtaattaaactaaaaaaaattattgcaaaatcaagatttttcatttttgtcatacttaactaattttaaaacttaataataaataatgttatttttcaaaatttttttgtgaaatattatttgataatatataatttcaaaattattattaaattacaataatgattttttatttcacaaagtaattttatttttgataaaaactctagtcagtataactagttttatcttaattttttaaaggataattataatgaataataactatatcgaagaaactaatgatagaaattcgaaaatcaaacctacaaaatttttcggtcttggaggaatgcaagaaattggaaaatccactttagtaattgagcacgattcagatattgtaataatagattcaggaatcaaatttgctgatatttttacaacaggagtaaaaggaatgattcctgattattcttatttagctaaaaatcaacacaaaatcaaaggtctttttattacacacggacatgaagatcacattggtggaattgtttatttagtacagcaagttcacattaaaactattttcgcaccaagaattgctattcaatatttaaaagccagatttgatgaatttagtttaaaactcaaaataaaatttattgaaattgaaaaagatgcagttcataaatttgatcatttaactgttgatttttgaacagcgcaacattcaattcctgacgcttttggtattagagtaagttctaaaaatggctcacttatgtgtacaggagattttcgttttgattacactccaattggaaattacacagattttagtaaattaaaagaaattggtgatcaaggtcttacaattttattctcagattctacaaatgcaatgagacctagtcattcacctagtgaaaaagatattttaaaagatatagaagaacacattaaaaatgctactaaaaaagtgattattactgcttttgcttctaacttaacaagaattaaagcaataatagatttaggaattaaactagagaaaaaaattgttacttttggtagaagtatgataaatggggttaaaataggaagaaaaatcggttatattaatatcccagataatgcttttgttgacaaaaaaaatatttctaaatatgatccaaatgagattttaattttaacaacaggatctcaaggtgaacaattagcggctttggataaaatgtcatacaacaaacatcctcacgttaaaatcggaagcaaagacgtcattattttttcctcatctcctatccctggaaacagaatcaaaattgaacttttaattaacagactttacaaattaaatgcaattattaaagaaaatggtccagatggttatttgcatacttcaggtcatgcttacaaagaagagcacgaaaaaatatttaaactaacaaaaccaaaatacttttttccctatcatggagagtatagaatgtgtttagctcataaacaaacagcaattgaatctggggtaaaagcttcgaatgtagttattccaagcgttggtgaagtttatgaaatagttaatcaaaaaattactaaatctaaacaagtaattcatacaggtccggtctatattgatggagatatagtttcaacagcaaactcacaaatcttaaaagaaagagaagaattacgagaaaacggttttgtttttatccttactgctatagataaaaaaacaaactcaataatcggaagatcaaaagtaatttctcgtggtgctttttttgcaaaaaattcaaaaacacttttaaatgaaatcagaagactagtgcatggagctgttttatttactatcaaaaatgaagcaaattgagaaattccgcagttaaaacaactaataaaaaacaggctaactaccttcttttataaagaaaaaagaagaaaacctgttattttatcttcttttttatttgttgataaaaaatacgattttttagaagattatgcaaaacaaaacaacataaacaaacaataaagacaggtaatttttatgaaaaaagatacacataattttatttatgttcaaggtgcaagagaaaataatttaaaaaatatcgatgttataattcctaaaaataagttagtggttctcacaggtgtctcaggttctggtaagtcttctttagcttttaacacaatttatgaagaaggaaaaagaagatatgttgattctctaagttcatatgctagacagtttttaggtggaactaaaaaacctaatgtagattcaatttatggactaatgcccactatttcaattgaacaaaaaacaacgcataacaatccaagatctacagttagtactgtaactgaaatttatgattactttcgattattgtacgccaagataggaaaagctttttgtcctaatcataaaaaagaaataaaagcttgaaaaagtttagatattttagattttatcttcaattttgaagcaaatacaaaaattttaattttagctcctataatacaaaaacaaaaaggtagctttgacgaattaacaaataagcttcgaaatgaaggattttcaagaattaaagtaaacgaagatatttattctttggatgaagaaatcaagtgaaacaaaaacattttttacaacatagatatagttgttgacagaatcgttgtttcagatacgctatcaaaagcaagtgtaagtgctgctatcgaaactgcttttgaatactcaaaaggtttagtgaaaatagaagcagtaaataaagaatctagaattttttctaaatttcattcctgcccagaaggtgattttaatgttcctgctatagaaaacaagcttttttcctttaattctccttatggaatgtgtcaatcttgtcaaggaataggtgtaaaattaaaagcagattttaaccttgtagtacctaataaaaaattaagcattaatcaaggtgcaattacctattttggaagttcagttaatacaaaatcaatggaatgacaagaatttgatgttttattaaactattatgacatcgataaatcagttcctatttcttcattaacaagtgaagaattaaaaattatcaaatatggaacaaaagaatcgctacagtattcaataatgtctgaatctggaaaactttatcacagagatagagaaattgaaggaattttaactagaattgaaaataaatatttagaaacttcaagtgaagaactaagaaattgatataaaaaatttatgtcagaattagattgtgaacaatgtaaaggcgctagattaaataattacgcactagctatcaaaataaacggtttaaatatttatgaattatgtgcttttccaatttctaaaatttacgactttatcaataatttaaatttaaatgattttgattatgaagtatccaaaaatatcattaatgaagtaaaacatagacttaaatttttaatagatgtaggattagattatttatctttaaatagaaaggcagaaactctttcaggtggagaatctcaaagaattaaactagctactcaaattggttcaaatttaacaggaattttgtatgtcttagatgaaccctcaatcggtttacatcaaaaagataatcaaagattaattgattcgcttaagaaaatggttgacataggaaatactttgttagttgtagaacacgatgaagaaactatcttatcagcagatcatattatagacatcggaccttttgcaggctcaaatggtggtaagctcatttcgcaaggaagtttagagcaaatccttcaaaataaagactcaattacttctcagtatctatcaggaacaaaagaaattaaaattccttcaaaaagaagagcgggcaagtcacaattcatagtaatcgaaggtgctaaagagaacaatttaaagaatttaaaagtagaatttcctcttggtaagttcatagctgtaacaggtgtttcaggttctggtaaatcaacattagtaaatgaaattttagtaaaagcaatcacaaaacagctaacaaatccaaatataagagtaggaaaatatagtcaaattaaaggtgtttttaatttagataaaataatttcagtttcgcaatcaccgatcggtagaacaccaagatctaatccagctacatatacttctgttttcgatgatattagagacgtttttgcttcagtagaagaagcaagagctaggggttatcaaaaaggtcatttttcttttaatttagccatcggacgttgtgataaatgtcaaggagatggttcgattaaaattgaaatgcattttttaccagatgtttatgtagtttgtgaccactgtaatggtaaaagatataaagaagaaattttagaaataaaatatagaacaaaatccatagcagatgttttagatatgactgttgaagaagcttcaattttcttcgcacaacgttcaaaaatcaaggataaattgcaaactttattagatgttgggctaaactatattaagcttggacaatcagcaactacactttcaggtggtgaagcacaaagggttaaattagctacatatttacaaaaaaaacctacaggaaaaacgctttatgttttagatgaacctactactggattgcacacttatgatgttgataatttattaagggttttaaatagaatcgttgatcatggtgatacagttttagtaatcgagcataatttagatgttataaaaatagctgattacataatcgatttaggtccagaaggcggagaaaacggaggttatgtagtagctactggaacccctgaagctgtagctgaaaatccaaattcatacactggaaaatacttaaaatttattttagaaaaaaataatagttctaaaaaagaagaaaaagtataaaatataagtttaaagaaaggacaaaatatggaaacagcacaatataaaattccagaagacttaattggtgcaagagcctttagagaaggtgaagcgttttatatatttccaaattgacttccagtttattcatttactattgttgtgggaatgatagtttctattttgactatatttttcttctgaaaaagagaaaaatacaaaattgaccaccttttaactttggtcataattacaattcctacttcaattatcggagctcgtttaggttttatttttgaacgtttagctgatcatgatccaacaatttctcaaacttggtgagatattcgatcaggaggtttatctattcagtgggcagttattgtaccaacaatttgtgatcttctttatatatacaaaaaacgaattgatatagactatagaaaagcattttcctttattttaccagcagttttaattggtcaagctattggacgttgaggaaattttacaaatcatgaggtctatggaaaaattgattataccggagcatatgttgattgattaggtccattaattagaaaaaatatgttcatttctgacaaagtaaatgaagctggtgcccttagagttcctttgtttttctatgagtttttaacttctttaattggttatattctaattgtttgagttttaaatttatttggttgattaaagccaggagcaacaggttctttatatattatgtactatggaatagttagagcatcaatggaagacttacgtcaagaagcttttgcaatttatttagttcttgctattttatcaattattttaggattaattttatttataaggttccaatttttcgcaaattactatataaaagtaggaaaaactcaaaatccagaacataaaaaaatattttctttaggtacatatattcacattatgaaatttgtaagatatcaaaaatctaaagaaaaatacttcaaaattccttttacaagatgaaatagaattgcaacaatccaaagattagaaattcaaaacttacaaaaaaattaataaaaattcgctttaaaaatacaaaaatttaaagcgagtttttatttaagtaataaaattatacaaaggagaaaatatggaaacaaaaaaatatgacgttttaataatcggtgcaggtcctgcaggaatgacaactgctttgtatgctgcaagaggaaatttaaaagtagcacttttagaaaaaggagcacctggaggaaaattagtctcacaatctaaaatagaaaactgacctggagatgaaatgattcaaggagcagatttagcccttagaatgtacaaacacgtattgaaatttggtgttgaacataattattgtgaagttaaagatgtaatttcaaattctgaattttctaaacaggttatttgtgaagatggaagccaatatgaagcaaaagcagtagtaatagcttcaggtatggtggaaagaaaacctttagatatcaaaaatttacttgattttgaacacagaggagtttcttattgtgtagtttgtgatggacctttttatggacataatccagctatagtaataggaggaggaaactcagcagtagaagaatcagcgtttttatcttcaattgcttccaaagttagtgtttttgtacgtgataatcaatttaatgcagagcctataatgattgaagagcttaaatcaaaagagaatgttgaaattttctttaattcaaaagttttggaacttaaaggaaaagactttttagaagaagcagtagttgatataaatggtacaattaaaactatcaaagcacattctttatttccttatataggctttcttcctgcaacaagttttttaactaaattagatattttagatcaaacaaaattaattccagtagacaaatttggagaaacaagagttaaaggaatttacgctgtaggagacgttgttcaaaaagaaattcggcaaatagcaaccgcagcttctgatggagctatagtaggaaaaattctaactaatagacttaaataatttttaaaattccttcatttttaaagcaaaaattaactaaatatttttgctttttatttttttatcaacaaaaagatatactaaattttatgcaaaaataacattagagtttataatttaataatactttttactaagaggttcaaaattgaatttcaaaggaataatatgacaaagaaaaataagaaaaaaaagttactattaaccttattcatttcttttggttttatagcttcgttttctttaattgtgggtttatcttcactcacaagatataaagcaataaatccaattgaacaagtacaaaaagaagctcgtaaaatcacaggagttacatttaatcctgatgcatttaagttactttctagctatgaagtaataagagatgaactttttgaaaaagaaaatgatgaatacagattaaaaaagaatattaattttgaagaaaaacttaatttttatgaagttataaatcaaaaaagtgaattgattcgctcctttcctaaagatattaaattagtttttgatttaatagaacctctcgatggtacacaagaatttaagattttgtttcattttcagcaatctattaataaccaaatatttaattctgaaattaaacaggttaatctagcagtaaaaaatcaaaaagaatttttaatcaactcatttatttctgaagttttaaaatcttttactccaggagaaaagtcagacctacatgataataaacctgaagatatttttgacataaacggaattagaatcaatccaatcgaggctaaaaaatcaccatcacttactttggttgatgattttaattcagagattaagaaaattagaactgtcaatgattttctaagaattttaaatcaatattttaatttaaatgaagtcataaattcactaaataaaccaattagctataaagataaagaaattacaccttttaaattagaatttgtaaaagacacagaaaatcaagaaagttttattactgaaaatccagatcacaaaggtatttataatttttatttaaaaatttcttttgctgattcatttaaagaattcatagcaaatgaagaagataaaaacttttctaaaacacttgttttaacgctagctaaagatgtttttggtacagaatctttctttattaaacctaataaattatttgactttgtttcaatgaaaaacattgattataaaaaagttcctaaaactgatgcaacaatactttcaaattatgatattttaagctttcaaaatttcttaatggctgaagataattcaacatctaatttaagtgattgaactttccaacaaaaagcctatgtaaataacaaagaaaaattattttctaaattcttagaacaaaaaattaatggttttttaaattcaaaattagagttaaattttgctaacttttttgatgcagattataaaaacagctttcattttgaactaaaaaataacattgtagcaaaacaagatgcaaaaggaatttacttaaatattccttacaagattattataaattctgcttatagaaaaaatgaagaagtagaaacaattattgctaaggactataatttagaacttagaggttttaaagatggaggtttattagtaagtctttataacaaatatattcaagattgaaattttaaacttccagaaaatgacactccaattcttcctaatttagaaattttaaatgctttattttcttcagttaatgatttaaatagttcaaattttgttgttgaaccttcaataactaacaaaataagcaaagaaattcatcctcttgagccaatgtcaggtgaatttttaaaacaattaattaacctaaataaaactgatgaattagtaaaagctttgcaagataaaaaatattttggtttaagtttttcagagttagattatttgaataacattcaatcaaaatataatctcccttctttagaacaaataagaaaaagttctattaaaatggatttagctaaaaactacacttcaaattttgatattgtaggtactttagatatttttaaaaacaaagctgaagtaggaagtttctttgctcttttattaaaagaaaaaccagatattgtaaaagaatatttagaagtaatttttaacaaatttgcttcatttttaaagcaaaattcacaaaacagctctgaatctaatgttaaaattaataattttaatttaactaattctacagtcaatgacgattcatttgattctaattttacaattaagccaattacaaaatttagttattccaaatatattcaatctcaattagctactatgttttaccaatatttagcaaaaattgatactaatttcaaaaacttaagtactaaaaatttagataattcttatttttcagatctttcaagttctacttatagtgtatctaatagtcaaattatttctaatgggataacctatagacataataatgccgaaacaaaacaagtatttttaaaagataaaataaatttacaagaaaaaacttattcctttaataataaattaataaattctttagatgaatttttattaagcttttattttgttgctggattaaagcaaaactacaaaggttttgataatttagcaaaaggatgaaaaactaaaatacattttgaactcttaccaagtgatttatctaagtttaacaattctgatcatttaaatttagcttattgatatgatttttacttaccaattagcgattctgacttaggtactcctatttttagaactccaaaaattgctatgtcactaaagatttctaatgaaaatattgtagattttaagcaaaaaataagactaaatgagctaagctcaaatttaccagctacagctttaagaactacacttgcaactgtttatgtaacatacatgactccatatggttttccttcgaccaaaaaagccgataaacaattagatgataatgatataacacaaagatttggagcttcagatttaaattctgaacaaacagcaaaagcatttgaagaactttttggacatcctgaactagtaagattacaagcttatttaaacaatgctaagtttatttataaagcaaattctaatttcaaaagtcgttttaatccacaaacaagaatattgtatttttatttaatttcagataataaccaaattcagtcaaaaccattttctattgtaataacttcaatacctaaacccaaagttagtgcaacaacagcagaagaatcaaaataactcaagaaagaagaaaaataattactaatttaagtaggtaaaataatgacaaaaaaatctaaaatagttttatgaagttttttaggtggaatatttttcctttttacagctactgcttctgttttagtagctactaattcaaaaagaaaaagttttcaatctttactaaatcaaagacatagtgaaccaacaggactttcagagcaaaataatgcagatcagttaagcgctagagactttgaaaaagtcgtttcaggctttaaattaaagccagaattttcaaatttaactgcagaaactgtttattccttgctacaagatcctagttattcttttaatattttagacataattgacacagataataaacttgatctagcttttgaagttaaattaaataattctagtgatgaaacacaacagactaaagtagaaaataatactattaaaaacttaatcatattagcatataaaaataaaacttatagcgaacagaatttacaagacaaacctatttttgtttatcaaactaactttactttaaaaggttttaaagaagattcaaaaacagcaaataaaactcaaaatgcttcaaaatcaagtactttcgcatcaaatactcaagcagaactaaacaaagaacaagaagaaaaagatagtaaatttttagatttcaatatttcatttttagattcttattttagtgttaatgaaaattttagtaatttattaccttcagattttttaaaaaaattagaagaaatatatacaaaacaaaaagatactataaataattcttcatttggtttgattactctattaggaaaatttaaattactaaattctttattagatcctattgttttaaagccaaatcaaaaacttcttttttcagttaatagtttaaaaaatcacagttacataattaatgatcgagaaggaaaacttttattagaatttaatttagaacaagataagaaaataattaatacaatttttctagagattagaggtttaaattcaataaaagatttaacccaagaaataaaaaaagacttatctatatttccgaatgcttataaattttataataaatttgacataaataatgttcaagattttagtttaaaagaaaaattacaaactaaattagaagctaaatattatgacaaaaaatctaaaaaaataaaatacgacacaaacttaattgctccttcagaacttgtaaaaaatcaagaagatttaaaggatttcctacaatttaatacaaataatattagaagaatatcttctgcttatgaagttagttttgaaccaattttcatagaaaatagaacagaatctgaaaaagaaactattaaaaatttagcaaattatgaaggaaaagttcgcgcagatttaaatataatgtttaaaaacaaatcaaataacataacttattcttcaataattaaagatgttgattttaaattatttaataatcaatttgataattatttaaaacttgaatacgatgctcaactggcacaattacacaattcagacaatgttttttatattaaacctgaaaataaattcatgttaatttcagacattttaagaggtttaaatacagtaattccttcttattataaaaatataagtaatagtaatcaagatagatgagataaagattcacagttttattcatattcttttaaagagcttttaagattaaacgactcaaataaaattagtataatatttaagtttatagaaaattattttaacaatcttttattagatgatcatttaaattctagttcacgaaaaccaggttatattattaaagagcttcttagaaaagtaaataatactaaaagtaatccattgcctaaaaccttttcacctactaaggttaattttgatttaagattcgattctgttgcacaagaattaatcattagttttgtaatgtctccagaagcagatggctatgaagaagaagcaaaatcaagacaaatcataataaaaggctttgctaaaccaaatttacttgatcaaattaaaaataattatttacctacagtatttttagatgcttctaattctgaaaaaataccagctgtgatagaaaagtcaaacttaggttttaatttatcaccagaactaaaaaaacatttagaaaatcatttgtttgaatttaaaaatatttcttcttctgctacagactcagtttcttactcaagcgttgatacacaacacaaaacatattttgtaaactcagatgttttatcaggaataattttaaataattcaggtttaaaaattaatagtattaagtctgattcacctgaagaaattcaacaaggatcaacaattaaaaatggttcaattttcttcacattccaacttttagacactataaatgataatgaaaaacactatattttaagttctttaaaagattcaaaattaggagaagtggctttatttataaaaaaattagataaggataaaacaaaagattttagcgatcaaccaagttttgttttaggcttagaatacaaaaatatttcgacaaattctacagatacaaataatgataaaatcaatgaatcaatagttgctgtgatttcttctgataaaaaaacagaggtaaaaccaattacattagattctaattctgcagtagataaatcacatttaaatattagcgttttagatagtaacaaaaacttttcaaatgtgttctttgcaaatgctttaagtacaataattttgcaaattaaagttaataatactcaagaaaattcttcattagaatttgaattaagaaccaaagcaaataaagataatgtttatagatcagtacttaaaacagataataaagatacaaaaataaaggctttatttaatcgtggaattgactttgcagtaattggttcgaattctgtggatcaaaaaagttctattttgtttaaatccttattagtttttgaacatataaatcaacaagattcagagcaaatatcaagaatattatcagagcaatatttaaaataaaacaacaaaaaaaccttgaaaaatcaaggtttttttgttgttatttactttatttttcttgaattggatgtaaaccaacaagatcagctttttcaatgaaagtaatagaagctccaccaccagttgaaatatgactaaaactatcttgtaaattatttgcctcaactgctgcaactgaatcaccaccaccaataactgtatatgcattttctaatttactaatttctttagctaactcttcagttcctcatttaaaattactaaattctgcaactcctaatgttccatttcataaaactgtatgagcgccttttagttgatttttgaacaatcttagtgttcatggtcctatatctaatccttcagcattttctaaaatttgaagaggaaatctaggattataaagtctttcagtgtctttaaattcatacgccatagcattatcgattggtaaaataattttatctcagtatttagctaataactctttagctagttctattttgtcatcttcaacaatagaaattccaatctcaaatcccaaagcttttttaaatgtatatgacattcctccagcaataaaaactttgtctgctttttctaataaagaagaaataattccgattttgtcagaaatttttgctcctccaactatagcaacaaatggtctttttggttgatcaattaattttgaaagagcttttagttcagtttctactaaataaccaatagctgattctttaatatgttgtgcaattccaacatttgaagcatgttctctatgcaatgtaccaaaagcatcgttaataaatacatctcccagtgaagctcagtattttcctaactctggatcatttttggattctgctttgttgtttaaatcttcgaatcttgtattttctactaataaaacctctccagctttgaggctactaatagcttcttctaattcaactcctctagttgtaggaacaaaaattatttcttgacccaattcgtttgctaattcttctgcaactattctcaaggatttttttgctaaatcttcttgagattttactcttccgaggtgagaaaataaaattacttttccaccctcatttattatttttcttatagtaggcaaagtagatttaattcttttagttgaagtaatttgaccattttgtattggaacattgtagtcaacacgtactaaaacttttttatcttttagaactaaatcatcaatatttttcttgtttaaaaaactttgcatagtgtttaggttctcctttgatttttttcgatttgtaattatatatgagaagaaaagaaaaaagataatttttcttctaaaattatatatatttgtacaaaattccttctttttcttcatttttaaccaaaagaaggaagaaatgaagaaaaataaagcaaaacaaagaaaaataaataatttttttgctttttttctttacaaattcctataaaatatgattaataacttattgtaagctatatacttaacaaacaggagaaaattatggtattaaaattttactgtacaaccatttgtgctaaagaaccacaggaaaatggtgagccaaattgtacatatagattaagatatgcaaaaaaagttcatggtatttataataattttcatgatattgtagttttaattaactcattcaatacaccagcaaggctttgagttagagaagacaataatttcagaagagttcttagatttccactgaatatagacaaattaactactgaagaaagatcagagttctacaatgatgttttttcagataaaaaagaactttctacttctattgagttagctgaagaacaattccaagaattagctgaaaaaaacaaagaaagaacactagaattagctaaaattgtttcattagaaaaaattcaagaacttcaagaagatacagaatctatcattgaaactacagaagctgaagaagaaattcacgaagaagaatgcgaaatctgtagagcagcagctcaaggaaaagagccagatcttgaagaagaagttgtggaagaggaagttgttgttgaagaaccagttgaagaacctctaattagcaataaagattgtgaaaattgccaagcattaaatgaagaagaaccagttgaagaatttggtgaatttaactgtgaaagttgcgagtcattaaatgaagaagaacaaatttatattgaagagccagttcaagaagaatttgttgaggaagaagcaacttttgaagaacctttagaattaactcaattagaagaagatcattttgaaactgttcatctagaagaagaattttgtttagcttgtcaacacattgcttcatgtgaaatatgtcaaagattggaagaacatgaagttctttataaattaaaagatggaactgttattaacttactagaacaacacgtagttgaaccagaagaagaacaacaagaagaaactgactgtggttgtgaatcaaaaacaactgaagaagcttgtgcatgtgaagaatgtaaatgtgatgaatcagaagaaaattgtggttgcacagatgaagataaagcttgtttagattgttcagaatgtgaagaatgtaaatttgatgaatcagaagaaaattgtggttgcacagatgaagaaaacaaaacttgccaagttactactgtttctgatgaagagattcactgtgaactatgtgaattagaaaacacagaactagaagacttagaaccaagattatttgaagatttcgaaaatgaacaagtagaacacattgaaattgaacatgttcaagataatgaatcctgatgtcatgatgaatgatgtagagaaatcgttgaacaagcagaaaaacctgaacacacattatcttgtggttgcgactttgattacaacgctaacccacttgttgtagaacacacacacgaagaattacatcattttgaagaagaacaaccaacagaagacttacatgttcacaaattagtagaaaatgaaggacaagctgaagttttaatccaaactgaaactccagataatagagtatttaatacaacttcaacaggaacttgtccagtaggaaaaacaacagaatgttcacaattacaagaaggtggttgcctaagttgtggatgtggacatctattcttagtgtcaaacgatcaattagcagctgaagttcaaagaagaaacttaccaatggttcttgacccacaatcttcagaatcatatttaagttctagaacagattcagaacaagaatataaagttagttgatgatcaaataaaaacttaattctttgattcttggtatgattcttactagctggtgtagtggttcttatagttcttgtatttgtattttacgctcgtgtacaataataaaaacaaataagcttacaattaatattttaaaagatacttttttaagtatcttttattttttttgttaaaatataatacattaaaagaaggtgtagttatgtctcagaattatgaaattgcaattttaacattactgattatcttttttttgttgtttgtagcaaaacaactattttttcttattaaaaaaataccttcgaaaagaacgaaatttgaagagctttcgaattcgacccaaaagcgtttggttcacgaaatcactacagctgttaaatacttatcagcaaccaacaccggagctattattactatagaaaataaagtagcaattgataatttaagaactgatggaattaaaattgatgcaaatatttcttcttcacttattcttgctatttttaacaaacaatcaccattacacgatggcgcaatagtcattagagataataaaataatttatgcctctacgttttttaaactaacgcaaaaatccgttccaagtaaatatggatcaagacatagagcagctttaggtatctcagaacaatctgattcaacaacaataattgtttcagaagaaagaggagaaatagggataagtcaaaaaggaaaaatcgagccagtatcttttgataattttgctcgtaaacttgaagctatccttaaaaatcacaacattattagtacataaataaattaaggagcagttatgacacttttagaactaattcggaataaagacattaacgcagttaggcaatacgcaaatcaggtcactgctgctcaacttgcagaagaagtttcagaattttctttatatgaaagatctatgttttttcgtatgctcacaacagaaactgctgctgaagttttttcttatttttcattagaaattcaagaagaattaatctcaggtttaccagatgagcaaatgaatgcattgcttgaagaattatatacagacgaaatcgccgaccttatcgaagaagttccagataatgttgcaaaaaagatattaaaaaacgttgataaaaacaccagaaatactattaatttacttttaaaatacacagatgaacaaattggttcaattatgtctgttgacatcgtttatcttaatgaaaatttgacttcaaaacaagctttagataaaatcagaaactataaagatgaagcagagttagttcattattactatgttgttaactatcaaaaacaaattgttggtgcaattactttagaagatattgtattttctgatcaaaacaaacttgtaaaagatatttgctttgcaactccgattgtgaaaactacagatttaaaagaaaaagttgcccaccactttgctgaaaatgatttttctgttttacctgtggttaattcaaaagatagactagttggtatgataacagcagatgacataatcgatattgttcaagaagaagcaacagaagatgtgtataaacttgctggaatttcttcaaaagaaatagaagattcttatataaaaactaccacattacagatagtaaaatcaaggattttttgattaattattttaatgttaggttctactttatctcaagttataattcagttttttaccgattctattgcagaaaatcaacgccttaaaatattaggtttatcaatttttattagcactattgtttcgataattcctgttatttcaggagctgcaggaaacgcaggttctcaatctgcaactaccattgtacgagctatttcattatcagaaattgaacgtaaaaatttctttaagcaagtgtttttaaaagaattagctgttggtagcataataggctcaattttaatggttgtaaactttattaggttaataatttattttacaatcagcaaggaccttttcaatacagaattagcgcactatgaagttgcaactaacgatcatacaattatgataaaacacgtacaaaatggcttaactcaaagagattatattttaattatttcagcagctgcttctttttctttgtttttagtaataattttttcaaaaatattaggttcatcaattcctttacttgcacagattcttaaaagagatccagcagttatgtctgcaccaattttagctactttaacagattctatttcaacatttatttttttcggaatcactatattagtttttatacttatttaactttcatttagtctctatttatctatctttaattttgaatttcaagattttgtcttgaaactttttattttcttgatttttaatttataattaaatagttatatattaaaagaaaggagattaaaatgagcttcgatattagaaaatatttagtgccggaaaaaatcaaagaaaaaccactaacattttcagtaggaattattttatggttcctgttagtattttcatatttacttttcgttgttgactgaggtttagcttttggtctaaatggagcagcaggtgaaaacggatatggaactttgggatactactttccaaaagaaggagtagatgacatcactaagcaagggactaactttggaattacaataggaagagccataggttcagttgctgtaggttgagcaattgcaaaatttacacataaatatgcagttattttagcgcttggatttatgctttttggaattgctgcaccttattcaccaacatatgctggttttgttattatgagagctttactagctattggaggtacaacaatgattgttttagtgcaacctattgtgtctgcatacttcaacaatcgtcaaaaagcagttatttcacaatttacaccttgattttatccaataggtacaattattacactagcaccatttgcagttgatacttcagtttcaaaagcagttagtgcacattgacaagaaatctacttaggatttggtttagtaactttaattccattattgggttatatattattaggttctagattcgatatttatccttcaacaattagaaaggaaaaagaagcacaattaacaaatccagatcaagaaaaattatcaatttgaagattcataaaacaaaaagatacttgaatttgaacattattgtatggatgttgattaattgctgttgttttcccttccagtttttcaaaaactctatttgctggaatgtcaaacaatatttatgcattagacactgaaatcaaaggccaatttaatccaataatcaatgtatttttaattatatttttatgtggaatgtttgcaggtccattcactgttggactttgatctaaatataaactaaaaagaaaacactttattgcattaattttaggtttaggagttttattttacgttttagcaactatagtatttttatacatggttgttccatctaacttaaatgctgaacaaacaacattaaaaatgggtggattaggtaatggtacttgattattttatattttaggattcttgatgggagtaatgctttgaggaattcaaggtgttatattaaatctacctcacgaatacaaaggttcaaatcctaaaaaagttggataccaatttggacttatttgaggattaggttatgcctttttctcaatagcaacagttattgtagctggaatccaatcaaaatcaacagaaggtgcttacgcagtatttattattttcgcagcactttcagtcttaggaattcttatttcaaaagaaccaaattcatcatacaaactttgaccttctcaaggtcttgaaaaagttaataaataacttaaaaacactataaaaaagaagaaaaaaagaaaaaaagaggtacaaaatgaaagcaacaaaaatagttttaattggagcaggtaacgtaggaaactcctttttatattcagcaatgaatcaaggattagcttcagaatatggaattattgatttaaataatgacttccgtgatggaaatgttttagattttgaagatgttattgcatcatcagtaagaccttttaaagttttttcagcagaatatgaagacttaaaagatgcagattttatagttattacagctggtagacctcaaaaaccaggtgaaactagattagaactaatcaaagacaacatcagaatcattagagaaatcggaagaaaagtaaaagaaagtggatttagaggaattacagtaattgcttcaaatccagttgatattattactagagcttaccgtgatgaaacaggttttgatcatgctaaagttatcggatctggtacaatcttagatacaagaagattacaatttgaaatagccaaaagagcaagagtttctacagaatcagttcaagcatatgtaatgggagaacatggagatagctcatttgttgctttttcagcagctaagattgctggagaatgcctatgcagattttcaaaaacaacaggaattacaaaagaaaattatgaacaagaacttgaatatcctgtgtcaagaaaagcttatgaaattattaacagaaaaagagcaacattctacggtattggtgctgctttagcttcaattattagaaatattattcaagattcacgtaaaattatgatcgtaggagcaaacttacatggagaatacggatttttcgatgtaaacgttggtgttccagcaataattggaagaaatggaattgaacaagttattgaaatttctttaaatgcaaaagaaagagaaaaatttgctaaatcagttcaaatcattgattctatgtacaaagaagcagaagaataataatagtttaaaaatttagtaaaaagcaagagaatttctcttgctttttttgtttttttcttcattttactatacaattttaaattaatattatggatacaaaaactaattcaaaaactttatacaatgcatatttagataattttttagaacctattaaaccaaaatcacatcaaaaatttattgcatttagctgaaaatgaaaagaagatttttgatacagttttattattcgtaaattagacttagaatttgatttaaataatccaaatctcttttatttaaactctaaaattcaagataatataaaaatcgattctgtaatagatcttggaaatttatatgtttttaaagaaaatgatataaaaattattcaaaataaaattttgaacaaagattttttaaatattaaattacaatcaaaattttttaattttgctaaaaaagtaattaatactcaaaaaataaatattttcagcgtcttttatgatacaactaactctctgtttcaaactaaaattttacaattagccaatgaacataatgaattttgattcaataatagataaaagcaaacatcaaaaaatctatattttctaaaaataaagtttttgaagagtccttgttattatttacaaaggaagaaaaaattaaacaaaatatcttgcaaaaacacaaacaacaagcacaaatcattattaaacaatttctaaaaactttagacagcttagattacgaaattcgctacaaaaatcaagcaaacaaacactgaaataataaacaaattaaattaattactaaagctaaacaaattagtagtttaaaacaaaaatagttctactttttaaattgtaattttctttctgttttgttaattaatcttacaatattttccttgtgtgctattactacaaaaatatcaccaattaataaaaataaaggatttaatcagtaatattcttctaaatcaaaggtaaaaaaagcaagttgccctaaagaaaatcaaggtataaatgataaacaaaccaaaataaaaggagcaacaatagaagaaagagaaacatacttagtagttaataatattacaaaaaaaattacaaaaccaattaatacaattactaaattaaaagcaaaaaaagcacctaaaagacaagctgctccttttccacctttaagcctaaaataaagtggtcaaatatgtccaacaatcactcctaaagccattactaatggaaccacaaaaataaataattcaacatttttctgtaaaacagaaactattattgtaggtatagcagattttaaaacatctaagattaaagttataattgcaattttttttccataaattctcaacatattagtagaaccagcatttttagaaccaacttcacgaatatcttttttcttaaataatttagaaattaaaatcgaaaaatttactgatccaatcaagtatccaactataaaaataactatattaaaaagaattaataaattcataatttgtaattttataaaaataatttataatttataagaaacagttgtcaaactaagtaaaaataacttaatttacaaaaatattttgcatttttgaaaattaatgtataattttattacttcaaaacttttagaagttggagaagtagctcagtttggtagagcgctacgtttgggacgtagtggtcgcaggttcaaatcctgtcttcttcaccatgggggggtagctcatttggctagagcgcctgccttgcacgcaggaggtagagggttcgactcccttcctctccaccatggctctgtagctcagttggttagagcgttcggttcatacccgaaaggtcaagagttcgaatctcttcggagccaccatatatttagacataccgatttggacctatagctcagttggttagagcaaccggctcataaccggtcggtcactggttcgagtccagttgggtccaccatgggcaattacccaagaggctgaagggactagtcttgaaaactggcaggggtgttaaagcccgcgggggttcgaatccctcattgcccgccatatattacgaagaagtataaaacttttagtagtcaaaaaaatttttattttaatgtaacttatgctataatatgcttacattaaaacacatagcggagtagagcagttggaagctcgttgggctcataacccaaaggtcataggttcgaatcctgtctccgcaaccaaaaggttcagtggtaaagtggttaatacgtctccctgtcacggagaagatcgcgggttcgatccccgtctggaccgccatatggctctgtagctcagtaggtagagcaacggtttgaagcaccgtgtgtcactggttcgattcctgtcggagccaccatatattcttaataagaatatcgattcttacagtttttaataaattgctttttaaataaagcatttttatttaaaaattaaagaaactttttgtttagaaagtgaaaatacataatttaactcactacaaatagtttctgcacccctagaattgttaagtttaattaataattctagggttttttacactttataagcaaattatgtcagcagaagtaatccaaggtcttattttacaagtttatgattttcaagaaaacgatttaatagtcaaaaccattacaaataaaagtattttttcttttattgcattaggaacaagaaaatcagaatcaaaaaacaaatttggaatttttgaatctagtatttcagagctggaagtttttttatcaaggttaaataacaagttatcaaaactcaaaaaagcaaattcagaactgagtttaaatttaaataactcaaaaatccttgaattttgaagatttatttctttttttcttaataaattagacaaaactagtaattatttttttgaaaatattaaactctcatgaaaaatagttaatgaacataattatcttcatattatcgtctttttacttgctaatcatctagttttacaaggttattttataagttttaataaatgtattaaatgtttaaaaaataaaaatttaatttactttgatttttcacaaggcggaatgttgtgtaaaactcactataaaaataataaatttcaaaatatttccttgttaaaatcatattattttttaagtttaaatgttgatcagtatttaaaatttgtaagtacaacaaataattttttaatttaccaagaattaaagctttttatagaaactaacctttatgtttttcctaaaaatttgttataatttctaaaatttatgataagaattattgcaggaaagtacaaaaacttattaattaaaaatccagattttaacattgtaagacctatgtcagatcgcacaagagaggcgattttttcatctttgcaattttttattccaggtaaaagagttttagatttattttctggaactggcgctattggaattgaagcattgtctagaggtgctaaagaagttatagcttctgaacttaataaaaaagttttcgaaaatattgaagaattaaaaaacaaatacaaaatagaaaattattttattcaaagaaaaagtgctttagtattactagatgaagtaaaaaatcaaaaattttcagtcatctttttagatccaccacacgctgaaattgaagtaactaagcaatcattttcaaaaatttacgagtataaaatacttgaaaaagaaggatttttaatttataaaactaacttagataataaactaattcctgataattttaaaattttaaaagaaaaaaaatatgcaagaaacacagtatattttttacagtataaaaatgaggaataaatggcaaaattaatagtattaaccggaccatcaggagttggcaaaggaagtatagaagaaattctttttcaaaatcctaagttaaaaattaaactttctatctctgcaactactagagaaaaaagagtaaatgaagaatatggcaagaattattactttatttctaaagacgaatttaaaacaaaaatagaaaataatgaatttttagaatgaaacaaacactttaacaattactatggaacactaaaatctgaagttgataacataatatctcaaggttttaacccaattttagagatagaaactgtaggtgcactcaacattatgaaaatgtaccaagaagctaacaaaactaatgaacttattactatttttgtagctccaccaacttttgaagatctcaaaaaacgtgtaatcaacagacaaactgactcagaagaacaaattaaattaagaattcaaaaagctttagaagaattaaatgaacaagataaatttcaatacatagtaattaacaaagatttaaaacaagctgcaaaagaagtagaagaaattattataaaagaagacaagaactaatgaaatattcaatattaacagaaaccggtttaagagaaaacaaccaagactcagttttagtagtagaaaataaagactttttattagctatagtttgtgatggacttggaggacattttgcaggagaagtagcttcttcaactgttacaaaaaccttcaaaacacattttaataataaaaattttccgaagttttgagaaaaagtttcaatttatgattgatacttaacaactatctccgctgctagagacaaactttctgaacttgctaaaaaagatgaaagatatttagatactaaaacaacatttacttcagttttttacttaaaaaaactacaaaaagcttttgttttaaatgcgggcgattctagagtttatagcttttcaaataatcaagaatttaaccaaataactaaagatcacaaccgtttaaacttaatttatttagaaaaagaaaaattaactttagaagaagcgttaaaaaacaaagattgacatttaatttcatctagcatcggaccaacaagtaaattctttttagatatttttgaagttccaacacaagatttagattactttttactagcttcagatggagtatttaattttttatcagagaatgaatttaaaacaatcttaagttctaaaagagaacttgataatgtagcaatttcacttttaaaaacagcaactaaaaatcaatctgatgataatttatccttgattttaataggactaaacaagtaaatgaaggctcaagtaacaagagtaattgcaggtttttacgatttatgaattccggaatccaacactttttttaatttattaaaatgcaatggcaatcttagaaataacaaaatgtctccactagttggagattttgtagactttgaacaagaaggttttatttataatattcatccaagaaaaaacttttttattcgtccaaaagttgcaaatattgataaagccattgtatgtatgtctatagaagaacctaatttttcttctagacttttagataaatttttattaattgttgaacaaaaacaaattcagcccataattattatcacaaaaaaagatttaaacaataattataaaaccattttaaaagactatatagatatgaattatcctatattttttgttgataatagcaatttttctttagatcaaaaactttataaaatgcttgaaaatcaactcatttttattatgggtcaaacaggagttggaaaaacaagttttattaataatctaactaataatagcttcaaaacacaagcaatttctaaaagccttaacagaggaaaacatacaacaagggttgtgcaaatagtcttttcaaacaaaataaaaattattgatacaccaggtttttcttcttttgatatagaaatcagtaaaaatgacttacctaaagctttttctcattttagatacctatctcaattttgtaaatttagctcctgttttcaccatcttgaaccagaacaagattgcaaagtaaaacaagaattaaaaaacaagcaaattcctcaatctcgctacgaaaattacatttattttttaactcatcatgaaaacaaaacttattagcccttctttattaaatgtttcaaaaaatcaaagattaaaaacaagcaaaacgctatttaatttaggaatcaagtgaattcactatgattacatggatgcaaaattcgttcctaacactgcaatccaagtttcagaaattaaaaaaatacataaaaaatttccaaatcaaattagtgatattcatataatggcatacaatccagaagtaataatggaacaaatttttaacgttgtaacatatgcaacatttcactatgaagtcttcgaaaatgcttcaaaaataaaggattttattaaaaaatataaatctaaaattaaaattggaatagcaataaatcctaatacttctgaagaggttttattaccatttttaagtgaaattgatttagttttaattatgtcagtttttccaggtaaaggcggtcagtcttttatagaaagtagctataaaaagattgctaacttagcaaaaatcagacaagaaaataactataagtttttaatccaagttgatggtggcattaaagattttaatgcaaaacaagtttttgatagtggagcagatgttatagtttcaggaacctacttagctgttaaacctacaaaacaaaaaatattaagccttgtaagagattaaaatacttttaaaaaatacattttatagtataattttaatactttttgtttcgacaaaatttttattaattatatttttaaggagatttcatggcaaatataaaatccaaaatcaaagcgattgcttcaaatgaaaaagcaagagttagaaatagtgcaatcaagtcaagagttagaacagctattaaaaaagcaaaagtagctgcaatgcataatcaagaaaatgtagcagctttagtagcaaaagctcacaaagaaattaacaaagcagttacaaaaggtgtatttcacagaaataatgcatctagaaaagcttcaagacttgatttatttgttaaaaaacaccaaacaataaacgcttaaaaatgtaattaacatttaataataaaaactcactatttaaagtgagtttttctttattttttaagtaaattaatacctgcataaccaatcatagctgaattatctgtacaatattttaaagggggaattttagtaataaatccttcatttttatagcttaaaatcaaatttcttaactctgaattagcagcaaccccaccaactaatgaaattgtctttatatctttaaaatccttcaaaatattgtcaattttcatctttaaatatttaattatacttttttgaaaatctacacttatctgagcagaattaacaatttttccttgattttcaagattatttattcgattaattacttgagttttgataccactaaatgaaagatcgtaaacgttatcagttataggaatagaaaaatatttttctacattcaaatcaggattttgtttgtttaacttatcaataactggacctcctggaaaacctaattttaatcgtcttgcaattttgtcataaatttcaccaagcgcatcatcttgagttttacctataatttgaatatcggtgtcatttttagcataaaagaactggctatgtcctccagaaactaacaaagctaagacagggaattttatatctaattgattaatattttcttctttttcttctatttcttctataaaagcagaccaaaaatgccctattaaatgattgataggcaaaattggtttattaattacaagagaaattgcttttgcaaagagataacccaattgtagactacctagtaaaccaggttcttttgtataaaaaacataatctacttttgatatatcaaagactgcttttaactgatctaaaatgatggctaaattctttgtatgttctctcgaagctagttcaggaatagttcctccatatttttggtgaacatcaatttgactaatgctaaacataaaaataactttgtatccttgcaaaacagcaatacatgcgtcatcgtgagatgattcaatagctaaaaaatatttattttgaattttcattattatttcctataacttggtttttattaaatttatgataaaatagtatctggtatgggtcagtactcaagaggctgaagaggacgcactgctaacgcgttaggggtgtgaaaacccgcgcaggttcaaatcctgtctgacccgccatttttttattgccttttttaaaaaaataatattgtaagcaataaagaaatgactacaacagcaactattgaataagtaactttaaagtaaatagaatatgttctttttactttattttttatttcaggatttaaactaatagcatgccgaatagttctatatttttcaagccttttttcacctattcaaacaattattaaaaacacacctgaagaaatataaggaattaatcaagttagaactctgcctgaaaaattaaagacttttagataataatcaccttcttgagcaattgtaggatctgaatttgctacaggaaagtagtttttaaataccattaaagaaattaaatcaattgaacctagtccactaggcgttggatttaaattattagacattatcaaaatattagttccagataagaattttatataacctacaaaatcaaagacattattataaagctctggatgtaaacttttttctatagctgtctgtgttgttcttaataagataaaaaaattcatatttatcaaagaaaatacaattgctttataaaacaaggtttccaaaaagaatttaaagtctttgataacgaaataaaagtttttcctaaataattcagcctctgcttgtaaaaaataatttaatctacttttatcttcaataatttgaactggattgaaggataataatcaaataaaaactaatattgctttgtgttgtaatttagttcagatggataaaactaaaataattaaagtaacaaataaattaataaaaatgttaaaaattagccaaacaaaaagaataattttgtctacactgtcaaataccaataagttatctttgtaaaaataaaaacctaagggcaacattattaaagaataaattaatataaaaatttggtgtaaaaaagcagcataagtaaaagctgacagaatctttcttagtttataaccttttttttgtaaatatcaatactgaataatttctccaccaaaataaaaaggcgttgagttagccataaacactcctaaaaataatgacattgaaatatgtctaaatttgataggaatatgaagttttttcataattctatacattaaaaaaccatttccaagcgagaagaaaatataatatataactatgaataaaataaatacacgcttttttaaattagttaaaaaaacatcataaaatccatttaataaagaactaaatgactgtccaacatcttgatttgttattttataaacctggtaaaataaaaaaaacaaaataacaacaattactgaagctaaaacaaatgcttttaaagcgtttttcttgttttgttgtttttgaagttcatgttttgataatgtcttaatttctttttttatttcattttcattgatgatagcatctttataattttgttttgttaaatcagatattattgtagtttttaaagttctttttatcttgttatacaaaaagtaaataatagtatttttatctagaacaatcttaattttttcttcattttctgaagaaattgcttctaaaaacttaacactttttattgttaaatctactaacactttttcttcattaagtttatgaataaaatttctaaaattatcataatttagacgctgcttaaattgatatataggttgaaaattatatttagtttttaaattatcgatttgttttaaaaagcaatcattttcttcttttaaagcttctaaaactctaatataaaatagtgcctgtgaagttaaactataatctgtattttctttattattgaagaaaaaaaagttttgttgattaaataaaaatacttgttgtttagaatatttttgaattaaatattcttcttgattctgattagaataaaaaactatttgctcttggaaatgttcttttaaaaaagtctttacataatcaagactttcaagattaacaataaatttaacttccctattgtttataaaaaattttcttaaatattccaaacaaataagttgtaattcgtttgtgcttagatattcaaaaaagcgtttatttttatacaaaatatcaatatttttatctttaattcagaagataaaatctgtatttttttcaaccctttttgtaagtttttttcaaataatttttttgttaaatttgttaaataaattattgttttttgagcttcaagacaatgattttatattatcaatattattttttttaaaataatcaatagctactttgctatcatcatttaagttattaaaaataccaaatttgaacttgaaattttcctgcaatgacaaaagaaaatttgcatttttctctatattttgcttgatttctataggatttaatatttttgcttgattattattttttaacttctcaatacttcatttttcttgaaaaacttcattttctaaagaatttaaataactaatttgttcagagtctaaaggttttagctcttcttgcttaatttgtaattcaacataatcttttttcttgtactgaaatacatctaaactaataaaaaaatcaaagtcaaattgtataaattcagatttatattgttgaagcgaaaaattagtgtccttatcatataaaaatacttctatttttgtttcttcagataaaacactagagatgatacttccaaaaacagttgtaatttcgcttttattacaataaagcattaatttaattttttgcttatgcaacaataaaaaatgctttaatttcatagcaaaattaaagacattttcttcgtttcattcattttctaaaattccaactggggctaaaatcttagagttttgaatttttaaagttgatataaaatacgattccaaatcatttgttttatttttggaagaagtttgataatttattttgttagtataaatactattcatcaaaagaatcttcttctctttgtgaactataaagatcaaatgcttcagcttctttttgaactacttcatctgcattattatctgcaacaaaataatcaaattctttaaatttaggtaaatcttttagcgatcttaatttaaaatagtcaaaaaatttattagttactccatataaaattggatttcctactgtaggcgcatttcccaattcttctactattccttttgctaataaagaaccaacaattgaatctgaaatcttcccacccctaatttgatttatcattgaacgagtaactggttgtttgtaggctattatagcagcgacttcaattgctgaatttgttagtttgtattttctttcattacttacaaaatcaattaaaaatggttttacatcttttgctgtaacaaatttaaaaacatcattaaactctacaatagttattcctctattttctctgttaaatttaatcatatagtcttttaaaatttttctagcttcattgactttatctagttttaaagactgttgtaattgttctgaagttaaaccttgttcaccttgaatgtataataaagcttcaataactctatatttcattttcttctccacctttgtaaatttttatatcaccaaattgtttttcttgttttaaatgtagtatatgttttttagccatttctaatactgatattaatgtaatagaaaagtgttttagcgtaggaagtgcaaaaacttcttcaaaatcaagcatatcatgttcttttaaaagattcaagacataattgctttgttcttcaggatttacatgcacattatcagttttaatttgaattttttcttttgcagagtttctttcaaacatcatccttaagatctcaattagcttcatttgagaagactttccatctaattttgaatcttctctttttcttttgtaatcagcataactacttgcttgtttttcaaagtaattatttctatgttctagttgttctctaagcatttctgcaattgcttttatttgttgatattcataaagcattgccaaaattttatttttatctatttctaattcttcatcaacttcatcagttttatcaattaataaagctcttgctttaatgtaaattaaagtagcagcaattactaaatattctgaagctaatttaatatttttatcttttaaatgatcgatgatttttatatactgatcagctaattcgacaacatcaacatctttgatttctatctttttacttcttacaagatctagtaataaatctaaaggtccatcataatttttaatttggatatttaattcttgatttaaaaacatattattttcttgcctttttaatttgtttttctgaaggattaattatataagattgttcaataatatttttagattttagagctagtgcttctgcaggttgggaggaaacaaatgttgccttaataggtttgtgaataataacttcgacagtaagtttctcttttctattggtatcaaaagctgcacctgaattattaatagtgataggaattataggtaaataatttttctttgcaattttaaatgcaccaatcttgaaattttgaatatttccatcctctgttcttgttccttctggaaacacaactccataagtttttttctcacgtacaaacttaccaaaatctactaaagttgcaaatgattctttaattttttgcctatctataaagaaagtatcaattagttgcaagattcattttgttacttttttatcttgtaattctttttttgctaaaaaagttaagacattttctttatcttgttcatctttattttgtttttctaaagctaaatatacaaataatgaatcagcatttgaagcatgatttgccactatcattgctggtgttttttgtatattttcataaccttttataaccactttgacattaaaaagttttagtaaagattttgcatattttaaaattaagctagatctaaaataaggtgcaagttctttctttttctttatatgtttagttgaaagtgatctaattttgttgattctataagctcataatcagcttcataatacaagttttaatttaattatcatattattccttgaccttcataaccacagctactacaatgttttcttcatttgaagtagtaatgaaaaattgattttcaaaattttctatgaagtattttctttcattatattttaaattaattttattaaaattaaaaaaagaattatcacatttaaataaagcctctttaattgcccaacgagtagctataaaatttagcttttcttcctccgcatttagtaaacaatattttaaaaattcttcattatgaagtattttttttacaaaagcttctgatttattcttaaatctttgtttattcgtgatatcaattcctatcatatagtaaattctctttcttttttcctaatttttttcttttttgttgaaaatactctaaaaattataaatataaattatatgatagtaaaaaacaaaggaatgatcttagaaaaaattattaacttaacaatcgacttttattgaaaaaataatatagcaatttgtcataagaaaaacttagatattcaatttaaaaaagtaaatgaaaatttaaagctagacaaaagctatatttctaaaaaaagcacagttgattattatggtatatacaaaggaatttttttagcatttgaagcaaaaagtacaaacgaaaacagattaaacttaaacatcattccaaagcatcaaataaactatttaaaaaaaattaaacaacattttggttgtgctttctttatcattttatttaaaacagatgaacgttttttcttgatcagtattgataaaattgactttgaaaaacaaaaatctttaacaattgactacttaagtaaaaatggctttgaacttattttaacttatcctggaattattgactttgtcgaatttatagataaaatgctgtaattttcttctttttcttttattttctgctaaaattcaaaaactattacttacaaattatgtcaaacttttttgattttgacaaaatatttataaacaaataagcattaaaatggattcggttgggtgtgcaaaaattgtgctagccgttagaaattttaagaagaaaaaaacaaactaaaggaaactaaaacatgacagcaaaatctgaaaacttaaaaccagaaaaagaaatcaaaacaaaatcagctgaacataattcagcaaatgaacaaaacaaagaacaaacacaacaaacagaagctactcctattgtttcaaaacaaaaacttttagaagcaggaacatattttggacacaaagcttcacaatgacatccaaaaatgcaatcctacattttaaaaaaacctaaaaatggaacacacattttagatgttgttaaaactcaaaaaacacttgaaattgcttaccaattaattcacaaattagcttcaaaaggagcttcatttatttttgttggtacaaaaaaacaagctaaaaaagttgtagaagcacaagcagaaagaactaattcaattttcgtttcagaaagatgattaggtggaactttaacaaacaaaaaaacaattttatctagattaaaacaaatgcaagaattagaagtgcatgctgaaaataatttcagtaattacaccaaaaaagaaggtgttttaatggctaaaaaacttgctaagttacaaaaaaacttaaatggtattagaggattgaaattcataaataatgataagttaattatgttagtagcagatccaaacaaagatattattgctattaaagaagctaaaaaagctaaagtaaaagtaataggaattatggactctaacaccgatccatctttattggattttggaattccagcaaatgatgattctgttaaatcaataactttaatctttacaatattagcagatgctattgcaacagctaaaggaggtaaagctttatttgcttaccaacctacagaaagcattgttcttccagaagatcctgacaaagaacaaaaagctataaataaatttaaaaaattcagcgcagatgcacaaaatcaaattcaccaaaaaaacttcactgcaagagtaaaaccagaagctcattcaaaagaaaaagaagaaaataaagaacaaaaacaaggagaataatatgtcagcagatttaatgcaaaaaataaaaaagttaagagaaattacagatgcaccttttatagattgtaaaaaagctttagagcaaactggtgcagatttagacaaagctatcgcttgattacaagaaaacggaaaaaccaaagctcttaaaaaagcagatagaatcgctgcagaaggtttagtttttgcaactaaaaaccaaacacatggagttattgtagaactaaattctgaaacagattttgttgcaaaaaacaaaaattttgttgaattacttcacttagtatcagaaactttattagaaaatgatttttcttcagaacaagaagcttttaaattaaaaacaaaattaggtaaaactattgaagattcaattacagatgcaacagcaactattggagaaaaaatttctttaagaagatttaaaaaagttgctattaaaccagaagaacaactaggagtttacattcaccacaatggacaaatagcagcaatagttttaattaaatctcaaaaagaacaagttgctaaaaatattgcaatgcatgtagcagctttaaatccagaatttatatttataaaagatgttccacaagaacaaattaaaaaattagaaaatgaattcaaagcctctccagcattagcaggtaaaccagaaaaaattcaagaaaatatcctaagaggtatgatgaacaaagaattaggtaaatttgttttagtagctcaagaatttgctttagaatcacaatacacagtacaaaaatatttagaagctaataattctgaattattggaagttgtaagatttgaagtaggtgaaggaattgaaaaacaatcagtagattttgctcaagaagtagcagctcaaataaaagagaatcaaaaataatataaacttaaatttttctattacaaatagaaaaatttttgtatttttttatgttagattttttaagtaaaagatttcaaaaatcatttgctaaaatgaatgctaagactacacttaaggaagaagacttaaatgaagttattagagaaatcaaattagcattattagaagctgacgttaatttattgattgttaaagattttatcaaggaaattaaagaaaaagctttagcaacagagattactactacattaaatccacaacaacaatttattaagatagtaaatgaaaatttagtaaaagtcttaggtgaaaaaccaaaacaaattaagtataacaaaccgattgaaaaaatagttttagtaggtcttcaaggttctggtaagacaactacagtagcaaaattagctcatttttcacttcgtaaaaaacatattaacaaaccattactaattgctgctgatatttatcgtccagctgctattgaacaactaatccaattaggaaaacaaattaatattcctgtattttcgcaaaaagatagctcaccacaagaaattgttagtgcaggattagaatttgcaaaagataatgagtttgatttagttattatagatacagccggaagactttctattgatgaaaaattaatgcaagaattacaagatatagaaaaaactgctaaaccacatgaaattttctttgtagcagatgcactttctggtcaggacataataaatgttgctaaaacatttaatgaacatatttctttaactggttccattattactaaattagattcagatgcaagaggtggagctgctctttcattaactaagctgttaaaaattccaatagtgtttattggaacaggtgaaaaaattacaaattttgatttattttatccagacagaatggcttcaagaattttaggaatgggagatgtcctttctttaatcgagaaggcagaagaagtaattgataaagatcaaataggaaaaatcggtaaaaaaattttttcaggtaactttaatttagatgatttactaaatagtttataccaaatacaaaaactgggtaagatgactaaaataattaaacttattccaggtatggcagataaaataaattcagatcaaattacagaagcagaaaagaaaatcaaactttatgaaattttgatttcttctatgactatggaagaaagaaaaaaacctaaattattaaaaaacgattcaagaaaaagaaggattttaaaaggttcaggaagaagttcacaagaatttaatagacttttaaatgaattcgaacaaatgtctaaaaaaatgaaggaaatatcgcaaaacaaaggcggtattttcaattcaatgatgcaaaataaattttaaataaaggacatattatggaagacaaaatagaaatgcaaactttaattaatcacttaaaacaattcggttttgtttttcaaggttcagaaatttatggcggtttagcaaatacttgagattatggacctttaggtgttttactcaaaaaaaatattcaagatctttggtgagattattttataaccaaaattcataataacttcgcaattgatagcaaaattctattaagtcccaatgtttgacaagcttcaggacatacaagtaatttcaacgatcttttaatagaaaataaagtcaataaaaaacgttatcgtgtagatcatcttttcgaagaattattccctgacttaaattttaatgactttacacaagaaaaaattttaggactttttaaagaaaaagtactaaaatatgacaactcatcaacacaatgagatgaaattaaacaatttaatttaatgtttgaaacacaacaaggtgtagttgaagataaaaagtcaaagatatttttaagacctgaaactgctcaaggaatttttattaattttagaaatattcagagatcaatgagattaaagctaccatttggaataggtcaaattggaaaatcttttagaaatgaaataactccaggtaatttcatttttagaacaagagaatttgaacaaatggaattggaaatttttagtcatcctgatcaagcgcaacaaatttttgaagattatttaaataaaattcaagatttcctttttaacactttaaaaataaataaaaatcttgttagaattaggcaccatgagccagaagaattagctcattattcacttgctacatctgatattgaatttttattcttatttggttgaggagaattaataggattagctaaccgttcagattttgatcttaaagctcattcagtagcttcaggagaaaaattagactatttagatccatttacaaatcaaaaatttttcccttatataatagaaccatctatgggtgttgatagattattgctagctgttttaacaaattgctacaaagaagaaataatcaaggaaaatgaagaaaaaagaacacttttatctcttcccttttcgcttgcaccattcaaagtggcgattttacctttagttaaaaaacttagcccaaaatctttagaaatatacaatttactattaaaacattctatttccgccacctttgatgaagcaaattcaattggaaaaagatatagaattcaagatgcaatcggaacttattattgtatcaccattgattatcaaactttagaagataatacaataacaattagagaacgtgattcaatgaaacaatttagaatttcaatagatgatttattaatatttttagaaaaggctaaacacaattaatgaatgttaaagaagttgatttaattcttaatcaagtaaatatttttgaagtaatttcaaactttattaatttaacaaaaaaaggtaatgactttttaggtctatgtccttttcatgaagattcatctccttctttatcagtttctgttagtaaaaaaatatttaaatgtttttcatgtaacgttggaggcaatgcttattattttgtaaaaaaatttaatcactgagatgatataaaaacgctagagtattttaaaaatcaatttaatttaaatattgatttatcacacattcaaagcaacattaaacactacagtgaaaacgaattacaagcattaaaagctcttgatgatgcatttttattttattctttagaattaaaacaaaacagccctgattatgtcaaaaaatttttattagaaagaaatttaaataaagaaatcattgactttttttctataggttattgtcctaaatcaggtatcaaagaaaagttgcttaaaaaaggacacgacgaagcacttttaataaattattctttgatttctttagaaaaaaaagtagatattttccaagacagattggtttttgctattaaaaaccttgacaataaagtaattggtttttcaggtcgtaaaattttagattcaacacttggccctaaataccttaattcatcaacaaactcattattttctaaatcagaagttttatataattactcaaatgcagttcaatttgcttctttttcaaagactttaataatttgcgaaggctttatggatgttattgcattctacaaagatggtattaaaaatgcaattgcaataatgggtacagcactaactaaaaatcacattcaacatttaaaaccatatgaaattttattagttttagatagcgatcaagctggtattgaagccactttaaaatcaatttatacattattagaacataaaataacaactaaagtgttgcaacctttatctaccaaagacccagatgaatatttttccaaatttggacctggttctttacaaaaagcaataaaaaatagacaagatggaataaattttgtttatgaacatcttagtaaaactattgacttgaataatctttcttcattagatcattttattaaagaatttagcaagtatttacaattttgtacaaaaaatattcaagactttttcatcgaaaaaataaataaagattttaacatctcccctacttcttgaaaatttttaaaaacaaatttagaaaaacaacaacgttattttaataatcattatattaaagagcttcctaaatattataaagatcaagtaacaccaatatataaagatgacttagaaaatcttggagttgaattagcagaacctaaaattcaagaacaaaaaaaatccacaaataagcctaaaaaggaattccaaatggaaaacagcgaaaaaattgctcttatttctttattactttttccttcatttatcgaagtcattaaaaaatataattatgaatttcaatctcctaaatttaaaatgtatttttccaaactagtttcatctaattttaaacaagaaaacatagaaacaatatattttaaacttacttcatctacagtcaaaactggcgaacgtgttaaattagaaaacacacaagataaatttgaaaatttaataaaaaccttacaaaataaacaagaaaatcgaaatattgaatctattttagcatcatgaaaaaacggaatgatgactgaacaagaagcaaaagatgcaatctctataatccaacaaagaaacaaacaaaaaaatgaaatttattaaggagtaattatgacagcgaaaaaattaacttctacatctacagatataaacgcacctaaaaaagaaactaatagcaaagaaaaagaagcaaaaacaactgctaaaaaatcttcatcaactaaaaaaagtatatctactaaaaaagcaacttcaaccaaaaaaacaacaactacaaagaaaaaagaagcaaaaacaagcactaaaaaatcttctacaacaaaaaaatctacatcttctaaaaagagcacaactactaaaaaaactgcatctacaaaatcaaaaactaaatcaaaaaacaaatctaaaaccaacgacatttcctttgtgattaaagaacttaaatctggaatgaaagctttaaataaaaagtttttatcacaagatgaggtgatgaaattcttagaaaaaaataaattagaacttgacacagatcaagctgttgatgagtttttaagtacattaattaaaaataaaattttaaatacagaaacagatgatttagatcaagaagagttggatttaaaagaatttgctcaaaatataaaagaaaaatcacaagaatttttccaccacgatgacgaagattctgatgatgattttatggattcattacacaatgatgatgattatttagacgatggtgatttcgaagatattgatgcagacgatgagttaaaaatcaaggatattcacgacattgaattggataaaattcatattagttctaaaactccttatatattaaatgacgcttcttatagaaacaaactttctgatacaaatgacatcattaaatgatatatgcgttgaatcggaaagtatggaaaattacttacaccagaagaagagttgagattagctaaaacagcaaaaatgggtggtcgtgtaggtaaaagagcaagacatactttaattaaaagaaatcttcgtttagttattaataatgcaaaaagatataaaaacagaggtctgacttttattgacttaatttctgaaggaaatcaaggaattttaaaagctgttgataaatatgattacaccaaaggttataaattttcaacttatgcaacttgatgaattagacaagcaatcacacgtgctgtagcagatcaagcaagaattatccgtattccagttcatatggtagaaactattaataaaatcaacaaaatagaaagagaattacaacaagaatatggagtaactccaacagatgaacagatagctcaagcaatgggtggagactttactgcagacaaagtaagatatactaaaaaaattaatatcgatcccatttcattagataaagctattggtaaagaagaagatagctccttttcagactttattaaagatgaaagtgtaatttcacctgttgattattcagaacgagaagaaaaaaccaaaatcctaagacaaatgatagaaaataatttagataatgaagaaaaagtctttattatgaagcgttatggttttggaactgatccaaacggaaatcaatacagaattcacagttttgatgaattagctaaagaaagaggagtaactaaagaaagaattagacaaattgagtcaaaaatcctaaaaaaactaagacatcctcagaaaaaatgaaaacaaagggatttaatttaatttgaacacttcaattttagacatttctaactatttaaacacattatttcctatagaacaagctgaatcttgagataagccaggatttagttttttcttcataaaagaagtaaaaaaagtgtttatatgtatagatttaacgccaaaaattttagatcaagccataaacgaaaatgttgatttgatcataactcatcacccttttttattttataatactaaaactttgaactataaatttagtccatataaaagaaaaatggttaaaaaaataaaacaagcacaaattaacattttctcgctacatacaaattacgattctaacagtaatgccacagctaatgcaatattaaagcatttaggtttaaatgttatacaaactcaatcaattgataattataatcttttagtagaaacaaaaattaagtttttttatctagtaaaacaagttaaaaatgctttaaatttgaagcatttacaaactaatttaaacaaaaatattaatataaataaaatagcaattttgccaggttctggtggtattgaagcagtttttttagctaaaaaacataaagcagatttagttataacatctgatttaaaatgatcagatgaattaagtttttcttttaaaaacattaatgttttgcttgttcctcatttgatagaacaattttttgctttcgatgttaaacaaagattagaaaaagaattttctaaccaatttgaaataaaaatagtattattagaagaaatactttacaacatttaaggaaaaaatgattaaacttggctctcacatttcatttaaaaaacccggttatttaacaacagcagtagaagaatcgcttcaaaacaaagcaaacacaatgatgatttttttaggtgctcctcaaaccactaaaagagttgatgtttctttgtataatttgcaaacttatttagataaatatcagaatttaattactcctgaagatattattgttcatgctccctacattgttaatccttcgagtgtgactaaacataaattttcaaacgattttttaatacaagaaatccatagaatgaactacatcggagcaaaatacttggttttacatccaggctcatatactacttttactattcaagaatctttaaatcaattaatcgagtctataaaatacatactatctaaaacaaaagatgttgtaattactatagagacaatggcaggcaaaggaacagaagtaggaacaacttttgaagatattgtttatgtaattgagtctataaattcagaacgtgttggtgtttgtttagatacttgccatatttgagatgcaggttataacttacataattatgatgaatttattttaaaattaaaatcaacaagattaataaactatttaaaagtaattcatttaaatgattccaaaaatgaattaaattctaaaaaagatagacatgaaaatataggaaaaggttttattggttttgaaactttacaaaaaatagtgcacgaacctttatttgataatataccaattattttagaaactccatgagtagataataaaccaatttacaaagaagaaattgaaaaattacttcaaaaataaagaaaaactagttttgacaactagttttctttattttaaattttaagaaatttcgtttttcaaaaagaaaaataaaacgataaaatactttaacaaaaagcatatataaaatatttaaaaaccaaatagttagtaatctaaatattcacactatatgttcttttctgttggaaattttcatttttctaacaaaagatcaatgtgatagatacatatttttagttttatttattcaaccaaatcgactttgaacttgtttatctttaaaagtttcttgatatcaataaagaaaatctaaataaaatcacgattcaaataaagcaaaagataataactgtgccaccatataacgagatttttgatttcaaatctttgtcatattgtaatttagtggaataaaattattaaataatatatgtttattaacttctttttcttcatctgttaattttgtatcgtacattcctatatttttgatttcaaatttttcttttacactaaaagaagtaaaataaacttcagggaatgcaaaagctttgaaagcgtagtcattatctttatattttgggtgattgctataataattagcaaattcttcttgattttctattagttctattctatttcaataaagttttacatcttctgttaatcctaagtgaagtcaatctgaaacacttacgttgacatcattatattctggaagtacagcaattttttgtgtaaaagaagataaagttacaattttttctttaaaaagactatatttttcttcttttttagggaaataataattgtaatcaactaaaattctatcatcatgtaatgataaatcatttctcattctaagaacatattttgtatttactaactttaaaccagctcttacagcaacaatcattctgttgtaattcattcccatttggaaaactccaggtagctttaatcctcccggatcttgactttttactattaatacgttaggaatgttttcaattaatgttgtatcatcttgttctcagcatgagactataattttgctttttggaagaacctttaaaactcgttttacagcattgtaagtgtgcttgttaaatggtccatttaaaactacacttaagtcgttttgatcaatttttttcaatttttttcaattaaatctcattgttgatttcctttaaatattcttttacttgcaaaggagttcctaaacttttatagttttgattttgaattttataaaagccaaccttttgtttaaatttattgattaaaatattataaatattagaaagataaaattcgttattgatttttaaattatttttcttcattatcctaaatgctctaaagaagaattttgcctttttaaaaaaatacataccagaaattgctaaattagaaactacttgtttttctacagttttaactactaaattatttttaattttaatatatgaaaaaagaggtaaattattttcaaaaacagataaatttgcttgattttccttcatttttaaagctttttcaataaaaaaacttgtttgattatttatataaaaattatctgaatctgcaattaataaagctctatttttacatactatattttcaacaagcgaagcagtttcggcagctccttttgttaatttatcaataaaaaccagtctaattttgtatttattttttagatattcaatttgctttggatatttatttaaaaattcttttagaaaaactactattttattttcataatctaaaaaactttcaattgcatattcaattatcatttttttatttactaaaataaatggtttatcttctaaaaatccttcttttttaaacctagcgcctgctccggcagcaataatgacgatttgaacatttttatttttcttttgcataactttacctaaattatgattttgattttatatatttctagtagtataaattaaaattttatcaacttagctatataatttttgaattttttcgatagcttttaaaaaaggttttacttccctatgactttaatttttttcttttagatacaaaggattatgtcctagtcgctaactattctcattttttctccattaaataattaaatttttctattgctaataagtaaaacattttttgatgttctagattttcataatggagtggaatcatagttaaaaataataatgcttcaataaacttgatgtcgtcaatgtttaagttaaactgtttttgtatttgtttttctaaataagaattagttttttttactatttcatttgtgaaaatttcatagtcaaaataaatgttttgtctttgttttaaagtaaatttatcaaattttataaaatcataataaccattaaaactatgaagtaatttttcaaaatcatatctaagatcacctaaaattgagtttttttgtgcaaattttcctcttggatctataaatttaagttcatttaaatctttcgaaattaataaatttgcaggataaaaatcaccgtgagtaattcttatcaaagcatttttaaaaagtttgtttttaattgtttgaaaaattcaatcttttattttgctaagatttttcattttaatattattaataaatatatattcagatttaataagatgattaaaataatcgatcttttctagctcttgtagtctttgttttgtttttgttaaataaataaaatcaagaaaatttacttcattttcttcatagtttataggatgattgtaaaattaaaaagaatttcaagacatttatctacaattgatttccaaaaactttcatcatattctttattcactaaaagagaagctaggttataaccatcaataaaagacatataatatccagaaaattcttgcttgttttgagcaaatttaaaatcgaaaacttctggaccaaatttatttaaatcgcttggtaaatttttatatcagtttcattcgctaaataatttatcagtttgaaatgatgatttaaaaattaaattattttcgaccagttctatagaattaaatgctctgctttgaaatttattcttcataaaatttagctaatagtttaatttaactatatttcctttgttattattaatttatattattgaatataataagtttcctttatcataggatcaaactaactatattattatatataaactaaacaataaaaaaagattaatttaacaagtactatttatacttcaataattatctgcgaaataaaaataaaaaatatttggagtttttcaaaaaaagtattataatttaaaaactaaatttaggactatgaagcataaggttgcgatacactaaaaagagttgttagttagttatcggtttttatgtggagtctggtttaagaaaaaaccaaaggagacaacatttattttttatggacaaaattcaaataaaacttaaagcatttgatcaccgtctaatagacacagcaacagctaaaatagttttagttgcaaaagaagcaaatgctgaagtaagtggaccaattccacttccaacaaaaaaagaaattttcactattttgagatctgttcacgttaacaaaaaatctcgtgagcaattcgaaagtagaacacaccaaagattaattattatcaaaacaaacagttctaattcaaaagtattagtagacaaaattaaaagattacaactaaattctggtgttaaagtaaatctagaattatcataggagaaatatgaaaggtattttaggtaaaaaagttggaatgacacaactatttacagaagaaggaattagtattccagttactgtaatagaagttcaacctaatgtagtttcaaatgttttaactaaagagaaaaatggttatgaagctattcaattagcagcatttgacaagaaaaaaagcagatttacaaaaccagaattaggacattttaaaaaagcagaatctaacccaaaacgttttgttaaagagtttagaaatatgcaaggtgaattaggacaaaaaattgatttatcaatctttgaagaaggtgaatttgtagatgtagttggaacatccaaaggtaaaggttttgccggaactattaaaagatataaccaacacatcggacctaaatctcacggtggaggtggaggttctaaacctattcgtcaaacaggttcaattggtgatatttcaggaaacaaagttgttaaaggtatgacaatgccaggacacttagggcatgaaagagttactttacaaaatttagaaattattaaaatagatttagcaaacaacattttagttgttaaaggatcagttcctggaccaaataagtcttatttaattattaaagaagcagttaaaagaacaactaagaaaaaaccagaagtattagttgtttatacacaagtagaaactaaggaggcaactaatgaataaaaaagaaaacacaactcaaaccaacagtgcccctaaaaaagaaattattaaaccaaaatcttcaactactcatactcacacacataagcacgttcatacacatactcacacacatgctaaaaaagttgaacctgctaaagaagtaaaaaaagaagttaaagaagttaaaaaagtagtagagccaaaaccagttgcaaaaactactccaaaacctgttgttgcttcaaaaaaagaagacaaaaaagttgaaattaaacaatctaaaaatgtagcaaaagttaatatttcaaacaaaacttcattaccaaaagaattatttggaaaaacagaagctcattctcaagctatattcgatactatcttatatgaaagaggttcacgtagaaatccaactcataaagtaaaatcaagagctgaagttagtggaacaggtaaaaaaccttgaaaacaaaaaggaacaggtaaagctagagctggttcactacgttctccaatctttgtaggtggtggtcgtgcttttggacctacaaataataaaaactacaaagtaaaattaaacaaaaaagttcgtagattagcatttgtatcagctttaagccaactagctgctaacaatcaagtattagtttctgactttgcacaaaaagaaatatcaactaaaacattagttaaaaaattagcttcagaaaaattaaatgaattaagaaatatattaattatttcttcagattcaaacctatttttatcagctcgtaatttaaaaaatgttaaagttacaaaatgaagctcaattttagtagaagatttagtaaaagcagatgtgtttgtaatttcagaatcagatattaaaaacttagaaggaacagttaaataatgaatataaatgaaattattaaagctccaatattaactgaaaaaacacatgagcaaatgtctgaaaatgtatatacatttaaagtagacagaagaactaataaatccgaagttaaaaaagcagttgaacatatttttgcagttaaagtagaaaaagtaaatatctttaatgtacctaaaaaacctaaaaaattaggacgtttccacgggtttacaaatgcatataaaaaagcaattgtaactttagcagaaggttcaattaacttctatccagaagatactcaagaacaaaaagaagcaaaattaaaagctgaacaagaaacaaaagctaaagaatctacattaaaagaaaaagctaaaaaaatagaagaaaaagttgctcaaaaattaggaataaaagcaaaagcttcagaacaagaagcaaaatcagaaaaaacaacagcttctaaacctaaaaaagcaactaaaggagagtaaatatggcgatgaaaatatacaaacctacaaccaatgggcttcgtaatatgagctctttagattattcaaaaaacctttcaggacatgctccagaaaaatcattacttgttattttacctaaaaaatctggtcgtaataacacaggaaaaattacaactagacaccaaggtggaagaaacaaaagaaaatatagaattatagattttaaaagaaataaatttgatattccaggttatgtaaaatctatagaatatgatccaaatagatcagcaaatatttgtttaattaattatgtagatggtgaaaaaagatatattttagctcctaaagacattaaaattggacaaaaagttgtctcaagcgatgaagctgatattttagttggaaactcacttcctttatcaagaattcctgaaggtacatttattcacaatgtagaattacaaccaggaaaaggtggacaattagctcgttcagcaggttcttcaattcaaatccaaggtaaagacgatgatggaaaatatgttgttttaaaactaaaatctggtgaataccgtcgtgtattagcaagatgtagagcaacaattggtgtagtaggtaatgaagaacataacttagtaaacatcggaaaagcaggacgtaatcgtcatttaggtattcgtccaacagttagaggttcagtaatgaacccaaatgatcacccacacggtggtggtgaaggtaaacaaccaattggacgtaaagcaccacttactccatgaggtaaaaaagcacttggaattaaaacaagaaataataaaaaagcttcaactaaattgattcttagaagaagaaaggatactaaataatggcacgttcattgaaaaaaggtccatttgcagatgagcatttacttaaaaaagtagaagcgatgaatgaacaaaaaaataaaaaaccaattaaaacttgatctcgtagatctacaatatttcctgaatttgttggactaacatttttagttcacaacggaaaagtatttaacgaagtttatgtaactgatgatatggttggtcataaattaggtgaattttctcctactagaacctatacaggtcatggacaagataaagggaagaaaaaataggtagaaattagttatggaaaataaattacaacaagcaaaagctagtgttaaaatgcaacgtatttcagctcaaaaagctcgtttagtggctcgtttaattaaaaaacaaccaactacaaatgcattagctattttacaaaatacaaacaaaaaagcttcatatttcttcataaaattattaaactcagcagttgccaacgctgtaaataatcacggattaaatggtgatagcttaattgttaaagatgtaattgtaaacgaaggtccaacactaaaaagatttcaaccaagagcaaaaggtgttgcgtatcgtattttaaaaagaacttctcatttatctgtaatagtagaagaagtaagtttgttaggagataaataattatgggacaaaaggtcaatccaaatggatttagatacggagttactaaagaacataacgctatttgatatgcagataaaaaagagtttgcatcaaatttattagaagatgttaaaattcaccgttttttcgaaaaactaacaagagaatatttaattggtaatacaaaaattcgtcgtgatcaagacaataaagtaacagttgttgtttacacagcaaaacttggagcatttttaggacaagcaggaagtaatcttaaaaaaataattgaagatgttaaaaagtttgttaaaaataaaaaacttgttttaaatatagacgcagtagaaattgaaaaaccagatttagatgctaaattattagctgaagcaattgctattaaattagaaaaccgtggatcataccgtatggctcaaaaatatgctattagaatggcacaaaaagctggagctaaaggtattaaaaccaaagtaagtggacgtttaaatggtgttgatatggctagatcagaaggatactctgaaggtgaaatgaaattacatacactaagacaagatgtaagttatgcaacagcaacagctagaacaacttatggagctcttggagttaaagtttgagtttcactcggtgaagtatttgcaaagcaaaatcaagcacaagagcaagaactaactgaaacaaaagcaccaaaaagaactacaagatctaaaaaagaaagcgcaaaggaataaaaaatgttacaacctaaaaaaacaaaacaccgtaaaacatttagagtaaaacatgacaaacgtgctgcttttagaggaaaagaagtttcatttgaagaatttggtctacaagctacaacatctgaatgagttagtgcaagacaaatagagtcagccagaattgcgattacaagaagaatgggtcgtgaaggtcaagttaacattagaatctttcctcatctttctcttactaaaaaaccaatcggggtaagaatgggatctggaaaaggttcagctgaaaaatgagtagcagttgttaaagaaaacacagtaatgtttgaagtaggtggagtaaaagaagaaatagctcgtgatgcacttcgtttaggtggacacaaactaccagtaaaatgaagaataataaccaaggaaaattaagataatggaatttaaagatttaaagaaaaaaaattctgaagaattaaacaaattattaaatgaatataaatcagaactatttactcttcgttttagaaacaaaactcaacaactagatcatactcacaaaatcaaacaagtaagaaaagatatagcaagaattttaacagcaattagacaatcagaattagaacaagaaaaaggtagaaaataattatgtctcattttaatcacaaatcacataaagatgcaagtcaaaaaagacaaaatacacgtaaaagtttaaccggagttgtagtttctgataaaaatgaaaaaacaataattgttgctgttgaaacttatgtaaaacaccgtttatatcaaaaaagattcaaaaaagttaaaaaattcgcaactcatgatgaagaacaaaaagctaaagttggagatgtagttagaatcgctgaaactcgtccatattcaaaaaccaaatcttttagactagtaagtattgcatcttctaaaggagaaaaataatgttacaagaacaatcaagattacaagtagctgataattcaggtgcaaaagaagttggattaatcagaaatttaggtggttcagttaagaaaaattctaatattggtgatgtaattgtctgctcagtaaaaaaagcaattccaggtggaattgttaaagaaggacaagtagttaaagctgttattgttcgttctgtatacggaattaatagaaaaaacggatcacgtattagatttgacgacaatgctgttgttatcatcaaagaagatggaacaccaagaggaacaagggtatttggtccaattgctagagaaataagagataatcaaaaatttgccaaaatcgtttcattagcaccagaagttttataaaaatatttgaatataaaacttcaaaatcctataaaaatgaagcaaaataaacaaatttttacaaaggaacaatatgaaaattagaaaaaatgacgaagtagttattatctcaggtgatgaaaaagggaaatcaggtaaagtattatctgtaaattctaaaaaacaaacagttactgtcaaagacattaataaaatcacaaaacacaaaaaacctaaccaacaaaacactgaaggttcaatttcaatttatgaaggaccaattcacgtttcaaaagtagcgattgtaacaaaaaaagcatctaaagacaaaccagctgaattttcaaaaatcggatacatttttaaagacaataaaaaacttcgtatagcaaaaactacaaagaaggtaatctaatatgaacgctttagcacaacactataattcaaaagtaaaaactgctttaaaacaaaagtttaactactcttctgatatggaaattccaaaaatagaaaaaatagttttaaacatgacagcaggaaaagaagttactaactcaaaagctatcgaagaagtaatgaacgaaatgtctttaatttcagcgcaaaaaccttaccaaaccgttgcaaaaaaatctttagcttcttgaaaattacgtcaaggaatgccaatgggagcaaaagtaacactaagaagagacaatatgtgagactttttagctaaactaatcaatgtttcaattccaagaattagagactttagaggagtaaatccaaaagcatttgacggtagaggtaatttttctttaggagttaaagaaatgattatcttcccagaaattagttttgataaaattcgtaaattaaaaggtttagacgtaattatcgtaactacagctaaaacagataaagaagctcgggcattattagaactcttaggaataccatttgctaagaaagcataataaaaaataaaggaaaatacatggcaaaaaaatcattaaaagtaaaagcagaaaaacatccgaaatttaaagtacgtgcttatacaagatgtcaattatgtggacgtcctcgtgctgtactacgtaaatttaaaatatgcagaatttgcttccgtgaattagctcacaaaggacaaataccaggtattaagaaagcgagttgataatatgataataacagatccaatagcagatatgataaccagaatcaaaaatgcttttacacgtaaacacaaaaacgttattattcctcattcaaagaaaaaagaaagaattttacaaatctttttagatgaaggatatataaaaggatttactgtatctggagaagtaaaaaaagaaattaatgtagagcttaaatacaaaggaaatacaagttcaattgtaggaataaaaagagtttctaaaccatctttaagagtttattcttcagcttctgatttaccaaaaattgtttcaggttatggaaccgtaatagtttctacatctaaaggattattaactgataaacaagcaagaaaggaaaatgtaggtggtgaaatcattgcttacatttgataattaatatgtctcgtgtcggaaatcgtgttttacaaataccagctggtgttgaagtaaatattcaaaattctttagtaacaataaaaggtaaattaggaacattatcaagagagttttcaaactttattagtattgaaaaaacagaatctacattattaactaaaagatcatctgaagaaaaaagtattaaacaattacacggaacaacaaattcattattacaagggatgttaactggagtttctcaaggatttgtaaaagagctagaaatcaaaggtgttggttatagagcaacattaaaagataaagttttagaattagcacttggttattcacatcctgttttagtagaaatacctcaagatctaaccttagaagtaccaaaacctactgttgtaattattaaaggaattgataaacaaagagttggtgaattagctgctcaaataagaaagaaaagaaaaccaaatccatattctggaaaaggtgtagcttacaaagatgaagttattagaagaaaagaagggaaaaaagcttctaaataaagctaattaattatggcaaaacaaacaagaaatcaagctagaattgttaaacataaaagaattttaaacaaactaacttctaatttatctacaaatcaaaaactaagaattggtgtttataaatcattaaatcacttttacgcatacgtttttgatcctgtatctgcaaaaactttaacttcagcaactacacttaaaaaagaagcaaaaacaaaaggtggaaacattcaagcagctcaagctcttgcaccagtatttgctgcaaaattaaaagaactaaaactagatcaaaacgattttatctttgatcgttcaggttatttatatcacggtagagtaaaagcttttgctgaaactttaagacaacaaggaattaagttttaattatggaaaatcaaaaaatcgaaaaacaagtacaagaaacacaaaacaaaatgaaatccactcaaacagttcaagcaactaaagaatctactgataaaaaacaagtttcagataaagcaactgcttcaaaaaatgaagcaaaaacctttaaaagaaaacctggatttgtaaaaaaagataaaaatcaattccaatcagaatttgaagaaaaaattatcgacatatctcgtgttacaacagttgtaaaaggtggacgtcgtttttcatttgcagcttatgcagtagttggaaacaaaaaaggtaaagtaggatacggacacggaaaagcaaatgaagtacaagatgcgattaaaaaagcagttaaagacgcacaaaatcgtttaattactgtaccaattgttaacaaatcaacaatccctcatgaaatttcagaaaaattcttagcttctaaagtattactaaaacctgctccaaaaggaaaaggaatcattgcttctaatacagttcgtgctgttgtagaattagctggttatacagatatttatacaaaaactcacggatctagaactaaaatcaacactgtgcatgcaacaatgaaagctttacaaaaattacgtacagtagaagatattgcttgagctagagatattgaagttgaaaaattaactcaaaattaataaattagtaataaggaataaaaatgtcaaaaatacaattacataatttaaaaccaactgaaaattctcgtccagataagcaccgtaaaggtagagggcatgcagcaggaaaaggaaaacaagctggtaaaggacaatccggacaaagaaaaagaggaaaagttcgtttaggatttgaaggtggacaaaacccttgatacagaagggtaccaaaaattggatttaaaaatgtaaattcaattactttccaaacaatttctttatcagatttagaaaaaacatacaaaaataatgaaactgtaactttagagtcattatttaaaaacaaattagttagaagaaaatatttaccaattaaattattagcaaatggtaaattatctaaaaaattaacaatcgaagtaaacgcagctagtgttaaagcacaagaattagtaaaagctgctggaggatcaatagaggttaaatagtgtttaaatttttaacaaagattttaggaaaagtttttgactacagtgcaaataaatacatcaattttaagcattcttttttagtcttatgacgagaaaagatattagtaaaaaagattttatttacacttttaatgctttcaattttcgttgtagcaggaacaataactattccaggactaagacttgttaatcaaaatgctattgatcgaaattcatttttaggaattataaatattgtaggtggtggtggtttattaaacttttccattgttgccttaggaatcggaccatttattactgcgtctttaataatgttaattgcccaaactaagttagtaccgccaattcaccgacttagtcagtcaggaccacatggtagacaaaaaattaatattattacaagattacttacttttttaattgctgccattcaagctgttgttttagtaagaactgtaataggaaatcaagcattacgttttgttgtacttgaagataattctggtttttatcaatattttataattccttttatattagttgcaggtagtttgtttgctttatttttaggtgaacaaattacaaataaaggtgttggtaatggaacatctttaattattttttcaggtattgcagttagattaccaaatcaatttaaagttgcttttgaatactttgtagattcttcaaattcaagctcaattatcaatgatatagttttatacttttcatacttattaggtttttttgtcttgattttaatagtagcttttgtttatttagctgaaagaaaaattccaattcaacaaaccggatctgggatgtcaaaaaatattaaagaaatttctacacttcctttaaaactaaatccagctgggattatgcctaatattttttcattaatagtagtttcattaccttctttatttacaggttttttagatccaaatacttcagctactagacactgaattcaaacacatatgcaagtaaatcaacctattggtttaactattttcattgttgtaaacataattttttcaatagtaatgggtttacaacaatctagagttgataaaatagcagaagattttgctaaaaattctacatttattcctggaattagaccaggagaacaaacagaagattatttaatcggagttgtttttagattatcaatttttagtgcattttatttaacaattttaggtgttattcaacctgttgaacaaatgctaggaatgccacaacaaattacttttggtgggacatcagtcataatcttagtaaccacagcacttgagactatgagtcaaataaaagctcgttatgatgctgaaaaaattattgttaagagaaaaagaattgataaagcaatgaattcaactaataaatccgtaaaaaaacaagcaaataataaagacttactatgataaaaaatactcaatctaatcctaaatcgttaaaattaatctttctaggctcaccaggctctggtaaaggaacattggctgcacaacttgttaaagatttaaaaattttacatctttctacaggtgatctttttagagcaaaaattaaatctgatgaagaatttgctttaaaaatgaagcaaattattgctcaaggtctttatgtaccagatgaaattacaaatgagattgttctcgattttttacaaaaagctaacttagaaaacggaataattttagatggttatccaagaacaatttcacaagctgagtttttaaaagaaaataattttaaaatcgatgcagtagtttatttaaatgcttcagaaaatgttattttagaacgtctttcacttagaagatattgcccaacttgtgcaacaacttatcacgaaaaattcaaaccagcaaaagataataaatattgctacaaagatggtacaattgttcaaatcagaaaagatgatgaacctgaagcaatcaaaaaaagaatcgatgtttacaaacaacaaactgcagttttaattcaatattacaaagacaaaaacttactatttgaatttagtgcagatcaagacttagaaactttaaaaaaccaagtaattaaaactttatgaaaatcataaaaacagatcaagaaatagaaatattaaaaaaagcaggtaaactcctggcagaggtaaaacaaatcatctacgatctcgtaagaccaggtgtttctttaaaagaattagatgccatcgcttttaaagagattacaaaacgaaatgcaaaaccttcatttttaaactaccaaggctttccagcaacaatttgtgccagtgttaatcaaaagttaattcacggaattcctgatgaatatataatcaaagattcagacgttgtttcgattgatttaggcttgatttatgaaggatttcactctgatactgcttttactaaagcagtaggacaagttagctacaatgataaaaaaattattcaagtagcagaagatgcattttgagcaggatttaatgcaataaaaaaagatgcaactacattagatattgcaaatgcaatatttaaagtaattaaacaaaataatttatacacacctaaagaattttcaggtcatggaattggaacttctttacatgaagaaccttatatttacaattatccaaacaaaaatgatgttgtaaaactaaaagataatatggtaatttgtattgaacctatgattttgcaaaattcagataaagtaaaaattttaaaagatggctgatctgttattgcagcatcaaataaaaacgcagctcattttgagcaaatggttttaattaaaaacaataaaggaataatccttacaggagaaattaaaaaatagatgtcaaaagaagataaaattatttttaaaggagtagtaactcaagtttttaatactcaagaatacgaagtagaatttgaaaatgggcacaaagtaatagctcatgttgctggaaaaatgaagctacatcgtattaaaataattgtcggagatcatgtacaagtagaactatcacagtacgatcttagcaaaggtagaataatttatcgttttaaataatttattattaaatatcattaaaacaggagaaatatgaaagtaagagcaagtattaaaaagatttgcaatgactgtaaaattatcaaacgtaaaagcacaaatagagtaatttgtaaaagctcaccaaaacataaacaaagacaaggatagtaaaatatggcaagaatattaaatattgaaataccaaatgataagcgtattgttatagcacttacttatatttttggtatcggaaaatcaagatcaaaagaaattttacaaaaatgcaacattgacgaaaacatcagaactaaagacctttcagaaacacaattacaagcaattagagaagtagcaaaagagtatacaacagaaggtgatttacgtcgtgaagtacaattaaacatcaaaagaatgatagagattaaatcctacaaaggtatcagacacagaaaaggacttccagttagaggtcaagtaacacaaaaaaatgctcgtaccagaaaaggtcctagaaaaactgttatgggtaaaaaggataaataattaaaggattaaataatggcaattaaaaaagacaaacctaaaaaaattaagaaaaaaaatataaccactggtattgctcacattcattcaactcaccaaaatacaattgttacttttactgatcttaatggaaatgttattgcatgatcttcttcaggtgctatcggatacaaaggtaccaagaaaaaaactccatatgcagcttctttagcagcagctgcagctagtgaaggcgcaaaagaacacggaattaaagaagttaaagttgaattaaaaggtttaggtcctggtaaagattcagcaagaaaacaaatagaagtttccggaattagtgtaatcgaaatcaaagacgtaaccccaattccacacaacggaacaagacctccaagaaaagtaattaaaagactaaccaaaagatagaaagtaggatctaaatgaaaaaaagtgcaaaagtgtactacattgaaaataaagcagaacatctttctgattttgaaacaacatttgaattacaacctttagaacgtggttttgcaaatacattgggtaattcactaagaagaacaattttatcctcagtttcttcagttgctgtttttggtataaaaattgaaggggttgatcacgagttttctgtaaaggataaagttcgtgaggatgtagtaactatcttaaataatcttaaaaaacttcgttttaccttcaaaaaagaagtatttttacaaaatgaaattcaagtagtttcttttgaagcgacaaaagcagggaaaataactggagctgatatagaaaatacagctggtttagaaattgttaacaaagatcaaataattgcaaatgtttctgaagctggagctttaaaatttgaaatgtttttaacttatggacgtggttttgttgattttgaaacaaacaaaataaaaattcaagaattaggtccagcattagaatctaaattaggatatggaaaaataatcgctgtcgattctgatttttcagcagtagaaaacgtaaatttttcatcaacagaactaaactcatcaaatccaattgttgaagaaaaactaacattttcaatcaaaacagatggaactattttagcaaaagatgcactagcagaagctgcaaaaatattaatagctcacttaaaattagttagtgatacttctaatttagatgctgaagttgaatcattttttgaagaagtaaagcaaaaaaaagaaccaccaaagaaaaattcagcagatcttactactttggatttaacagttagatcattaaatgcgcttcgtagagcacaatattataaagtttctgatttactagaacttactttagaagagttagaaaacattaaaaacttgggtaaaaaatcagtagaagaaatagttgaaaaattaaaagaacataatttagaacttaaaaaaggagaataaaaatggcaaatccacatcaaatttaccgtcgtgatgcaacttgaagaaaacatgtacttcgttcattagccactcaaattattttacatggaaaaataacaacaacacttccaagagctaaagaattaagaaaacatgtagaaagattaattactaaagcaaaaaaagatacattagctgcaagaagattagttttagcttatgtacgtcacgaaaaaaccaaagatggtattgaaataatgccatatttattcaaaaccattgcacctaaatacaaagaccgtaatggaggttatacaagaataattaaattacctccacgtttaggtgataatgctaaaatggctgttatagagctagtttaattacaattttaaattaaaattagtttttaatttattaaaaaacaagtattaaaaaaccactaaaatttagtggttttttcttcatttttaaagctttttacttacttattatttctttgcaatacaaaatgtttttaaaaatattttaaatattttctctctctctatttcttttaaatacttataatctctattttcttcttttttaaagtcattggaattacgaaataatttattttgccgaatttgttatgtttcttaaaagataatcgaatttttatattgtttatctactacacatttattcctttgtattttttagtagttgatacaaattttcgatatgtaatttaaaatcttcttcattttttggataaatagttattaatttagcatacatttaaagatttaaactttttgatgaatacatctttgctaatttatatttttgagatacttaaattctaaaaaattatttagacaatatgtgtaaataattttattactttagaataatcttttactctaggtactatatgtattttctaattttgaaaaggtaatggataattgaaaaatgttaaaaatttaaaacattctttttcttgttttctagcagaatttatcacatctttatttgagttatatttattaacttttgattgaatagggacggatttttgataaccttttatcttcatttgtctacttttcttctttttttgtatatattttaaatttttcagtcgatttttaaaattatagatttaaattattaattattttatataattaaaataataatttttatacattaaaaattttactagcaaaaatgttatcaaaataaggaaattatgaattatattagagcaaaaagattagtaccagagatcagatttaaaaatttcactgacgcttgacaaagttggaaacttgaaaataaaggatttttatattcaggtttaacttctaaaactaaaaaagattttgcaaatggtaattcaaaatatattagttatttaaatgtttacaaaaattttaatactgatttaaaagataaatcttcagtttttattaagcctgatgataaacaaaacgttattgaaaaaggtgatattttatttacaatgtcttctgaaacttatcaagaagttgggttgtcatctgttgtaactgaaaaagtgaatgaaaaaatttacttaaattcattttgttttggttatagattaaatgaaacaaattttttatttccacattttgcttcatttttatttagaagtgatgctgtaagaaacaaaattattctccaaagcaatggaggcacttctaggtttaatttatctaaaaaatcgtttttaaatattgaaataaaaactcctcaaattgaagaacagcaaaaaattggtcaacttttttacacgttagataaaatcgtaagtctttatgagagaaagataaatttgtttgagaagcttcgaaaatatttcttgcagaatatgtttgtaaaggaaaatgaaggaaaaccgaatgtcagatttaataaatttgacactttatgaactcaaaaaaacatagaagataattttattatagatggtggaggatttgtttccaaacaagaaataaaaaacaatccagggcaatatccagtatattcatcacaaacttcgaataacgggaaaatgggttctataaattattataaatatgatggagaatttataacctgaactacaagaggagctttagcagggagtatattttatagaaacgaaaaattcagtgtttctaatgcaggactattacaagctaaagacaaccaactttcagatgtaaaattttattattatgtgttgaaaaattctaatttaagaaccataatgactataggcagtatacctcaattcactgtgcagatgattaaaaatattaactgtataattcctgataacaaagaagaacaagaacaaatttctaattttttaactcatatagatattactcacgcacaactaaagcgtaagcaaaagcctaaaaatggcctttttctttgaaatttagtactttttgaagaaaaatcatattttttacacaaacatcttatttaagagcgatttttgtatgtttttattaaatttaacttacgctttagttgtgcgtgagttaaactgaagttctttaaaagctcggaaattttcttttgttcttctaatgtaggaaaaattatttttaagtttgaaacagctgatcaattgatataaacttgagtgtttccttgtgcgtttttaattattccttctcttccttttgaatttaagtaaaaataagtaaataatggattgagaaataatttattaagaactattctctgtgttctttgattataaataaatttattatcttcagggattaacaaaactcttcctaaaatgttgcaactttgagttttatcattcaatatcatagctaaatcatctttatttaatataaagtttttactttttcatttaaatcaattcgtaagttctggtcattataattattattttcattaaaactaccaatactgattactttgtattttccagtagtattaaaatattcttctaatgatgtacctccaaaagagttgacaactttatcaagttctttagcagatcatttatagttgaaatctttaaatctaatgcttggttttgcttcatttttcttcacaaatatattcatcaagaaagcttttcaagcttttccaacacactaatttttctctcgtaaagacttacgattttatctaacgtgtaaaataaagtagaaattttttcttgttcaaatctatttaataaaataacaaccggtaaatttaaaaatgttgataaagccaaagaagaaaaagttccagtagaagaatttaaacgcacattttcttgaaatgtattagaggataataagtaataaacatattctaagtcaaaagtttttttaattattgctccaactattccttgtttcgttgcagttaaaattttatttatagaaacatttccaatagttgctcctgtagtaaaaataatattattcttaggaatcaatcaagcggaactattatttaatcctagttttgaaatgtatgaattagtttttaatatatatttttggttagtgtcttcaatttttacaaaaggaatttcattagcataaaaacttttattagctgtagaaggagttcctccttctgaggcatattcaaacaggttttcaaccttaccctctattcaagtgtgaaaaatcatttttcacaaaaaaggcaattgcaaaaaaaaaaaaaaaaaaataatgtaaaatgtttatcaatacattaaagaaaggaggaaattttatgaaaactttattagatgttaacaaactatctaatttttcaatttcaactttagatgatattgatgctttaaaagatattgttattcaagataatattgttgaaatagaacaagaagctgcaagaatccgttttaccattttgtgtgtaataatacagcaataaaaatacaatagaaagataatgatgaaaataataaaaattttaacatttgacagaaacaaaaatatccttatctttatgttacaaaatctttttgtagcatttttatcattgaatttgttttcttataaatttataattgattattttttaaatcaaatcagatttgaagaatttataccttgattattaatttgtttgttttctcttcttttttctatattacttcaatgaattttaacttttttaaagatttcagtaactagaaaaacttataaattattacaagaaactattattactaatttatccaatcaaacttatttacaaatttctaaacaaagaaataaaactgtagctttatttaatgattatttagagtcatcaatgcttttattagaagtctttcataattatttatttaagtttatttcttcatttgtaattcctcttatttttatgtttgtattaaaccaatgatcttgaataatttttcttacaataattttttctcagattttaatttttatattcttcttaattattgttccaaactttcaacaaaaatttcaaaatttaatgcaaaaatatgaagaatatgcacaaaaacaagtaaaaacattttctctattttctgttttttacttttttaacaaaataaatatttttaataaattaatttttaaaaacacagaaaatgtgtttgcaaataatttcaaatttaaattaaaaacagattgagcaaattcagtagctacttcaatttcatttttatttacaggagtagggatagcagaaatagcagtattaatttattacaaatttatagacatttcaaatttcttgtctttattatcatatttaataattatttcatctgctttttctcttttatttaactcaatttttccattaattacatatactcctactttagttaaaattttagaagaaaataaagaaattaaaaaatataaatatgaagaaattgaccagataaatactataacaatcaaggatttatcttataagactgatgaaaaaactataatttttgataaactaaatttagaaattattaagaataaaaaatatgcaataattggtgaatcgggcactggtaaatcaacacttttaaaattaattgcaaatttagatgaaaattatgaaggttcaatttttataaataatgaaattgatttaaaagacttgaatcctaaaaatactttaaaaaatataggtttaatcaataatcaaaacacaatcttcaatgatacattcttaaataatatagttatgtgagatgaaaacccagatttagaaaaagtaaataaattaatagaagaatttaaaattaaaaaactagagttggatgaaaaatttgatgaaaattctttatctgaaggtgaaaaacaaagactaattttggcaaggttaaaatatgatgattttgatatttgatgtttagatgaagcattagacaacattgaaaaagaatttagtaagcaaatttgaacaaacatattacaacaagatgataaaacaattttagctattagtcaccattttgaagaagagattttaaatcaattcgacgaagtaattagactataaaaaagaaggaaatatgagtacaaaattaaaattaattttctataatatttgaaatgtttgttatgtattacaatttttaatcactagttttattattactgttgctccttattatttattcactttcttacaagaaaacaattatataaacttagttattgcttcaattatattaatcttttcttttataatctcagctattttttcaggatatcacagtgcaattttcgctggttttattaacattttaaagttaaaaaatatatctaaaatgattcaagtttttaatgaaataaacttaagtgaatataataaaaattctgaaggttattactattcagagattaaaaacaacaacggtgaaagatttgaaaaatattattattctttgattgaattatcgaaaaatgttttatatattattgcaattttaactttttcattttatcaacattgagttttaggcattacactttcttgtatgttgatattgttttttatattttctttatttataaagccaaaactagaaaaaatatatataaacaaaacagaatcttgaaatgaatttaatgaaaatactactcaaattctttcatacttaccttcattatatacattaaataaaaaagaaaaattaaaacagttattttctaaaaatttagataaaaatttaaaaatttacaattcttatttaaaaacttccaagtttttttctttaatttcagaaaatatgaatttagtttttaaattagtagtaagtggagtagtaataatttattttggaatattttttaaagatgatgcaagtagtttaatagcttcagtttctataatagttttagtcaatatattattagagaacttttttgattatttatctgatactagtgaaaactttttaaactttttaaaagtagaaaaagctaaagcacaaatccaagatactacaaatataattccttttaaattaaatatcacagaatataaattttctttagaaaatgaagcattttcaaacattgtagttaaagatttgacattaaaattagaaaataaaactttatataataacaaaaatttaataatagaaaaaaacaaaaaatatattattaaaggctcaaatggttcaggtaaatctactttagctaaaatctttttaggacttgaaaaaaattatttaggaaatgtcttattcaatgataaatacgaaattaaagatatagattttaaatcacttaatcaatattttaactatttatcaaacaatacacttttaatagaagctaatatagaaaataatataaatttattcgaccaaaattcaaataaaaacgaaattagtaatttaattgaaattttaaatttatcttctattgataaagacaaaattttaggtcaagaagatgataatgacgtttcaacaggacagatgcaaagaatagctttagcaagaaatctatatttcaaaaaagatattttaattattgacgaaggtctatctaacatcgataaagataatttacaaaaagctttaaagatcttgctagaagatgcaaaccttacactaatctatatttcacatcacaatgatgctgaacaagaaagtctttttgatcaaataattgatttagataaataaagattacattaaaataatttctatttaattttgtaaaaaaaatgcttcatttttgaagcattttttactcatttgctatgtcaaattctttgggtaattttgaattaaatttcaaaagtgttccgtctaaatttgtaaattcaatttcgtatgcatgtagtctttgattaaaagcatctacttttgttccataaacaggatcaccaaaaactggatgttttatataagaaagatgaaccctaatctgatgtgttctcccagtttctaattcacaacgtataagtgaaaaaattcttttttgataataaaatactttttctacaaaaacatgagtaatagcttctttagaattaaagtgagaaacagccatcttttttctatttttttcatctctagcaattggtaagttaatatggctaatttgatgctccaattttccttctactattgctttatattttctctttatttttctatcttttagttgttgagctaaaaaattatgcattttatcatttttagctactaacataagacctgaagtgtctttatccaatctatgaacaatccccggtcttaatgcaccatttacattagataaatgattaaatttatataataaagcattaactaatgtgttttcgtaatttccaggcgctggatgtacaaccatatttgtaggcttatcaactactattacattttcatcttcatagactatttttatatctatattttgtgctttggcatttaaaagttcttctttttcttcatagtttccttcaattttcattccctctttaagaataaaattctttttgctaactactttggaatctatgattatctgattatttataataatttcttgaacaaaaactctgcttagttctagttttttgcttaaaaatacatctaatcttttttcttcatcagctattaaattaatttttttcacagtagtaaaattataacaaaataaacttgctaactaaattaggaaaaataaataatttttgtattatttaaagtaaaatttagtaaatattacaaaagcaggagtattgaatttatggcaaaatatattttacatacaagtaaatgtatctataaagatggtaaatgatacaataaaaacggcgaagtgattatagataatacccaagattcaaatgaatctaattctgataaatcaagttttaaatttacatttaaagattttgtttctgaactaaaaggtgataaaaaagaaaaagtgaacaaatcattaaaacaagttagaaaaataattgaaaaaactgagaaatttttagaaaatttagaaggtttatcagaagaactagaagacatattagatgaatctgaagatgaagatgaagaaaaagataaataatcattatattatgtaacaacaaaaccacttgaaacttcaagtggttttgttgttaaaatttctttattttttcatttctgcaagctttaaataattaaatacaacttctttatcaaaaatgtatttgttctttaaattatcttttaccagttcgtttacttgatgaattaatacatcttttaatttatgagaatacttcatttttaaagaatttgtaaaaaattcagatacatctaaaagttttactgatttcattggacaaatctttaaatctaagtcataatctatatatttaactgtgttgtcttcgaaaataaacgaagaagctaaattgatataaatatttacttcattgcctttaaatctaattagtgcattataaaacttatttttaggaaagattcataatgtcggatcttttactactcaatgagctttatcactttttacttttgttcactttaaattgagtattaaatgttttgctgtgttttgaataatttttgcagtattccattgacgataaagtgttccgttaaatttgtaagcttgcacatttacagtatttgacttttctttatctttagtcattgtgcctattttctactggttattcttaagttttattaaacaattttatatatattgaataattaaaaattctaccactattttgtaaattatgttaatttttaaatatttttatttttttaaaaagttttaaatttgaatatgtataattttgtttatacaatttttttacacaaattaatcaatgaatttacatatcaaattttaaaaagaaagaaggtgttatgaaagttaattgaaaaaaacttttcatgttttccacttttgaaattgtaattagtggatttttattagcaattttttcagttttatcttttatactaaaagttcatttaccatctaaattaaatgtagcttttgaaattccattttatttatttttaggaattattttaggtccatttaaaggagcagtagtagcgctaatttttgatgttatgaatgctttaattaaaggtcaaatccacctctgggcttatgaatatgcaattatccctccatttatagctattctagcagcaggttttatgtttttattaactacaaaaaaagatatttgacttattttaccagtggttttaaccttcacagtagctcttatagtatttatctactatttatctatgagtgatgcacaaattcaaaaaacatcaaaatcatgaaaaggaatatttaataaacaattaattattactttattaatcattatttattcttttatattcttaataggtggtggtctgtttttaatgtatttaaaaacaaataataaaaaatgaagattagcttttattgtctttgttttactagtctttattatgattgttgttagatacttctgacatccaattgcttttgttagatattacaatagatatttaaatagaactggaaaagatagatatatttctgattatttcttcttctatttaactccgatgatattaaaatcagcagtgaccttacctgtttatacagtatgtttagtgactttgactccagttgttttagaactaaacaaaaaacataattttaaattcagattaggttgagcaaaataaaaagcagtttatctgctttttatttttttgtaaaagtaattattaagccaaaattcagacattttatttataagttattttttaatatatttaaatttgaagaaattataaattaattaaagagcaaattttcaagtaagtaatttaatgtttatagcatttaaataaaacttaaataaatgaagcttctttgtaataataaaaatttaacttcaaaaaagaagaaaaaagtaattaaaatgtatttttcacacttgaatagagggtaaggttgaagattgattagacattatacgaggagaaaggataactaaatctgaattagttcaaggttcataccccttgattagcggtggcattgagccgatgggtttcataaataaatttaatagaactgaaaatacaataataatagcacaatatggttctgcaggttttgtcaattttcaatctacaaagttttgagcaaatgatgtttgtttttgcttattttcaaaatctacaaaaatataatttacaaatttatatatttttatctttattctaatcaaaacaaaatttattctcttgtgaactataatgcatttccttatagtatctccaaagatgaattaaataatttttctctgtatattccttgtacacaagaacagcaaaaaattgcttcacttttttatacgttagataaaatcgtaagtctttacgagagaaagataagtttgtttgagaagcttgaaaaagctttcttgacgaatatgtttgtaaaggaaaatgaaggaaaatcgaatgttagatttaaaaatttcaccgacaattgagtagaggctaaggttgaagacatgtttgaaattaagagaggaagaaacatcacaaaaaaagagttagaacaaaatcaaggaaaatatccagtttattcttctcaaacttcaggagatggaatactaggtaaaataaacacttttgattttgaaggttaccatttaatttgaactactcatggtgcaaatgcaggaactgtatttttaaaaggtgataaattttctacaactaacaactgctttctattagcaattcagaataacaataaatttagttatatgttttatttgctgtctttatctttgatgcctaaaaattatattaattcacacggtgctattcctcattttacttatcagggaattcaagaattaatattaaaagttccttgtttaaaagaacaacaaaaaatcggagatctatttttaaaggtcaaaaatactcacgcacaactaaagcgtaagcaaaaaagcctaaaaaatggccttttttctttgaaatttagtactttttgaagaaaaaatcatatttttttacacaaacatcttatttaagagcgatttttgtatgttttttattaaatttaacttacgctttagttgtgcgttagttaaatcaactttagtaaaaaaagtagaaattttgtcttgttcttgtattttaggaacctttaaactcaattcatttaaaaaggcaagtgagagtgtgtatctttgcgctccttgtgcatttttagttaaaacatttctattattagaatttaaaaatgcataatctaaatagtaagtagaaaatgtttttgtgtatgctctatatcttactaaatgataagaataaactgcgtctttaattgttttggcagatgtactaaattttcctatatcttcaggtgtttcagatgaaggagttaaaaacacatcattttctaatatattaaaattttttatttgttcttttgttgctgaattttttttaagattcgaatatttaatttccttttttgtaaaaacatccatataattcaacattgctactttatgatcttgatttctaataactttatctacagtacttcctttgaaaaatccaaaatcgcttaactttatactctttcaaatatcagaaaataaattgaatctaatacttggttttgcttcattttcctttgtaaacatactttctaaaaatgattttttaattttctccagcaagtttaactttctctcataaagacttacgattttatctaacgtataaaaaagttgacctattttttgttgttcttttaaacaaggaaaattgaaattaatatcagaaagttgatgaatcattaattttgcatttgcactagaattatttacatattgttttgaaatcattgctaatgattttgaggttcaaaaataatcaaaaagttttaaatttttatttctactattccacaacgatcagtgattgaaaattttccatttctatagaatattgttccagcatgagcaccatcagttgttcaagtaataaattcaccattgaaatcatatgtatttattttcccaagttctccattgttttcagtttgagaagaatatacaggaaatttacctctattattttcaataaagttttgtaaaattacttttcctcttttaagataaaataaatctccaaccttaccctctattcaatcgtcagtgaaatttttaaatctaatctctggtactaatctttttgctctaatataattcataatttccttattttgataacatttttgctagtaaaatttttaaagtataaaaattattattttaattatatataataattaataatttaaatctataattttaaaaatcgactgaaaaatttaaaatatatacaaaaaagaagaaaagttgacaaaatgaagataaaaggttatcaaaaatcagaccctattcaatcaaaacttaatgaatatgagccaaataaaattgtgataaattctgctagaaaacaagaaaatgagtattttaaatttttaacatttgacaattattcattaccatttcaaggttggaaaatacatatagctccgagaataaaagattattctaaagtaataaaaattatttactcatattgtctaaataattttttagaatttaagtatctaaaaaattatgaattagcaaagatgtattcttcaaaaagcttacatcttcaaatgtatggtaaattaattactatttacccaaaaaatgaggaagattttaaactacacatagaaaatttgtatcaattacttaaaaaatacaaaggattaaatgtaatagtagacaaacagtataaaaattcaattattttttatagatatggaacaaattacagccaaagaccttatttcgtaaatccaattactttaaaaaaagaaccagatagaagtaaaaattatttttatctaccttcatttgtaaaggatgtttttgaagaacaacctataatttctactaaactttcacaatataatttgccatataatatttatcaaaatacatctggctttatatttttaggcgcgaaacaaaatgataataaattaattactattaaacaaactcatatttatacttattttgattctaaaataagtttagttagtttgagaaaacgtgaagaaaagttttgaaaaatcattaaccctaccatttttatagaatctttttttgaaaacaattatttttatgtagtaaaagagtttataaacggtagagatttgaacaatgtattaaactcaaatttaatttattcattactagatcataaaaattattctgattttttgtttaatataattttaaatttagtaaaagttattgattttcatcataaaaataatattattttaaaagatattaatttaggaaattttattattacaaacaaaaacgaatttcattttattgattatgatttttctttttttattgatgaagactttaaaaagaaatttgatttaaaaaataatgtcattttggatacggatttatttcaaattgataaatccaataatttaacacattttcaaaaagattacttcaagttagcgattatgtttttacaacatttttttaatcatttttattttaaaaaagataactctttattttctttggatttactattattttgaaaatttactaagttttttggtttaaaatcttatatttttaaatcaattaatttactactataccaaaatccagaaaaagttaattttgtacaagaattagaaaaaatcaaagaaaaatactataaaaaagaagcatttttaatgttttcagaaaactatatagtcaataaagtagaagatattttagctaaaaatcctaaaatcaagtttaaatttaaaagttgaaaacataaattaattttttctgttattaataacataaacattgaaaatatagaaaacaaaaatatccagtataaaaatctgaataaactaagtgtatctaatttaattttttattgtttttatttattaaataactttattaaaaataaaaactcagaaaataaaaaaatcttgaaagaaactattgacattttaatttcaaaagtttccaaagataacgagtattatgcaattaaaataaaaaatgtaatttctccgtatttgcaaaatggtattttagctttgatttttcttctttttaaggtaaaaaacatcttcactgaatacaaaacattatttaataaattattaaaacaagcttttaaaacttttacattaaaaacaaatttatgatttggaatttcaggttatataatgttttttataaattattataaagaaacagcttctaaaaaagcttataaacaaattttatctttaatagaaatattacttttatcatataacgagtctgataatgatattttagacactataaaaattaacaacaactattttgaatgaaacataaatggcaagttatatgttttaaaaagcttttattctataattaaacaaaataaagaaaaaaacaaaggaaactaacaatgaaatccagttttttaaaaaatataaaagatggctctaaaatattattatttgaaaaaaagcttcatttttctttatttttagttaaaaatattaatattgcaatttggtcattacatttttattcatataattttataataaattattttttgaataaaaatgataatttcaatgtttttattgcttgattagttgtaggaattatgacagtaattttggcaattattttaaattgagtttcaaatattttagtagtaaatataagaaccaatacatatgcaaaattacaagaaaaaattattttaaatttatcacaaaagtcatattcatacattattgcaaatagaagtgaaacaatttcgcttttaaaaaataatacagaaacttcaatgactttattgactttatttatgtttaatatatatgaagcttttggaaatttttttataactattatttttatgcttgctatttcgtattgatcaggtatttttattctaacattgttaattgctagattaattattttagttgtaatctataaatgctctccttatttacagaaaaaaattgatatattattagaagaatacaaaatttcaaatcagaaggaatttaaacactatactgtcttttatttatattattttttcaataaaattgatttgtttaaaaaaataatattaaaaaaattgtctaatttttattcatttttctttaaaaataatttacaaactgattggtttgattctttaggaaatactttagatttttctgcaattgcaatatcaattatagaattagttgtattaatatattatcaatatattgaaattggagttttatttgcttttataacatatattactcgaataagttattcttttactcatatttccaactccgttgttgcttttagagtatatacacctgttttaaatgaaattttagaaaatgcaggtagtcaaacaaatttaatgagttttaaagaaaatattttatctatagaattagtaaatattaactttaaatataacgaagaatcctttatttttaaagacaaatcacttaaaatagaaaaaaataaaaaatatgcaattttgggtgattctggatctggaaaatcaacattattaaaaataatttcaggtttagttacagattatgaaggtcaaatactactaaataacaaatatgaattaaaatcaatgattgcaaatgatataagagaaaaaattggatttattgataataaaaatgttatttttgaagacaccttattaaataatattgttctttgagactcaaaaccagatcttgctaaagtagaaaatttaatgcaacaatttaaaattaaaaatatagatttaaatacccaaataaacaaacaaagtctttccgaaggtgaaaaacaaagaatttcacttgcaagggttttttatcaagattttgaaataatttgtttagatgaagcattagataacatagaaaaaaattttagcaatcaaatttgagattatattttaaagactaataataaaacaataatagctattagtcatcattttgatcaaaaccaactaaataaatttgataatgtaattcaagtgaaaggttaatatgtcaagaagatctaaactaattttatttcaatcatgaaatgtattttatgttttagaaacagtaattacaaattttatttttgttgttgcaccttattatttatttgattttttaagagaacaaaacattaataaagtaattttaactttaattatttttatattatcaagagtaatctgaggaatttgtgtaggataccataaagctattttttctggatttactccactaataaaacttaaaaatgtagaaaaattaattcaaatatttgacaaaataaatcttaaccaatacaaacaaaaaggtgatggattttacttatcagaaattagaaatattaattcagaattagttgagaaatattatgcttcattattaaatatcatttctaattcattattattgatagctacctcagcatttggattttatcaatcttgaattttaggaactattttagtaatttctttcttcatttttcttgttttttcttactttattaaacctaaattagaaaaatattacgatcaaaaaaatcaagctgtaaatgaattctatgaaaaaacaggaaatattttaaattatcttccggctatgtatacattaaataaaacacagcaaattaaccagctattttcaaatgtaatatgaaaaaacattaatgtttataagtcatttttaaagtacaaaaatttagcaagttttgtttcttataacttaaacaaaatattacacattacattaggagcagcaattactatattttttactatatattacaaagataatgtagcaaaattattatctaatctctctgtagtaatttttgcaaatatcatttttgatgaattttatacagatttaagtaattttacagacgatttaataaattgacttcaagtaaaaaaatctaaaaatgaagctgctaaaaaactgaattcacattttgatattgaattattaaaagataaaatttttccttcagattcaaatgtttttgctataaaaataaaggatttatccttaaaattagaagataaaactttgtataataaaatgtcattgaatatagaaaaaaaacaaaaatatttgctaaaaggttcaaatggttcaggaaaatcaacgttagcaaaaattttgttaggactaaatcacaattacgaaggaaatgtagaaattaacaacaaatgtgaagcaaaatcattagattttcactgagttaacaaacactttaattacttaggaaataattttgatttagtagaaggaagtttaattgaaaatattagtttatatgaagaaaatcctgatttagaaaaaatagattgattaattaaaacactcaatttatcttctattgatgcaagcaaaattttaggtcaagaagatgataatgatgtttcaacaggacagatgcaaagaatagctttagcacgaaatttatactttaaaaaagacattttaattatagatgaaggattatcaaacattgacaaagaaaatttagatatcgctttaaatttactgttaaatgataaaaaccttactttaatttacatttcgcatcatagcaaactagaacaagaacaactctttgatcaagttattaatttagattaaaacaacaaaaaaatatgaacagagcgttcatatttttttgttgtttattagaaactatttgtttacaaattccttaatttttttcacaattgcttctttttcaaagccaatttgttgtagtatatcttttactggagcagaaatcccaaatgtatcaatccctatatttaagctagcatgttttgttcaaccaaatgtagaagctagctcaattgaaatagatttagaaggatctcaaataggtgtattttgtcaattagataaagaaattaaattaaaatccaactcatctgctatttcttttgcaagagctaattcagaacctgtagctacaatagcgtattcagaattgcttctttttacaaaataagcaccctttttaaattcttcttgattagtatttttcaaagatacaatattttgtctagttaaaacaataacagtaggtactaattttgaatttactgcaatttcataagaagcttttacttcagtttcatcagcaggacgtaaaacgtgtaagttaggaacagatcttaacatagctagttgctcaactggttcatgtgttggcccatcttctccgacttgtactgaatcgtgagtgaaaatataagtaactggaagttgcattaaagaagaaagtcttaaagcaggttttaaatagtctgcaaaaacaaagaaagtagaaacaaaaggcttaaagtaagaatgaagagctaaaccattagctatagctgccattgcaaattctctaactccaaataaaatatttcttccttgtctgtttgtaatagaaaaattaccatcaccacctttagctttagtagaaccactaagatctgcagaacctcctattcaagaagataaagtttgatttaaatgttcaattactgcccctgaagaagctctagtggctatattttctttaatatcaatttcaattttgtgttctttttctgaagcatctattcaattttgtagctcttttgaaattttaaagtttttaaatgcttgctgagatctttttactaaagtatcttcgtatagttgttttacttctaaaggaagagtaaattcatcataatttcagtctaaattttgttttaaaatttcaatatctttgccaagtggagctccatgtacttcagaagttcctgcttttggtgtgtcttctccaattattgtttttacttctataaaagaaggaagatcagattttttggcttcagaaatagctttatcaatgtcttcaacttcgtttttagcaacaaaaatatagttaaaacctaaagcagtcattttttgtttaatatcttcagaaaatgtagcatttactttagtgtctaactgaatatcatttgagtcatataaaacaattaacttatttaattttagatgtccagctaaagaaaatgtttcatttgccacaccttcttgaagatccccgtcaccacatagaacataagtatagtgattgatctcagaaaatttagattctaagtgtgcttgagcaatcgccacacctgtagcaattcctattccttgacctaatggtccagttgtagcttctacaccctttgtatgtctatattcaggatgtcctggagttttggagtttaattgacgaaaatcttttaaatcgctttctgaaattagacccatcattcttaaaagtgaatacaataaagcagacccatgacctactgatagtataaacctatctctgtttattcagtcagggttttgaggatcgaagttcatgtgtcttgtaaataatgtatgaacaatttttgctgcacttataactattccaggatgtcctgaatttgctttgtttactgctgcaactccgttcattttcaaagtatttattgctagtttgtctatatttttatacatattttctcatttctctatcaaatattaggtgtacattttcaggctctatattaattaataactttacagattctttaacttttcctaatatttttttaacagtagttgcatagtcaaaattatcttttgtgttcaaaaaaagctttagagtcaaatttgtagattttaaattaatattaatatctaaatgttgtacttcaattgaatcaattttttttaaagcttttttaatttgtgaagcaaatgcttttttgtaaactaaatattcttgatttaaagaataatttacaactacaaaattcattattaatctcctcttgaaacgtattttccagtttcagtagatacaattattttttcaccttctttaataaataaaggcacatctaattcatatccagtttctacaataacttttttagaaggatttgaagaagtatttcctttaacagcatcataagctgtagttactagtagttcaacttttggttttaattcgatatcaagtacttcgttttcatattttctaactaaaacttttgcaccttcaactaaaaaatttacttctcattgaactttttcaagatcaatactaatttgttcataatctgtatcgttcattaaaacaatacttgttccgtcgttgtataagtaagacattgttaatttttcaatgtgagctttttctacttttgtaccacctgagtaggtttttaaagtaattgctcctgtttttaggtttttgactttagctttaacattagcttgtccacgtccttgttttgagtgctgtgattcaattacagcataaatttgaccatcatctttaaaagtgattcctggtttgaattcatttacatttatcattggttttcctttgaatttttttataaatttaataaattttactttatttttatagtataaaataaaaattttctctgttttgtagtatataaatttatatcagaatttaaaaaaaataataaatttgtttacttttttaattttttttgtaaaattctaattattattcaattaggtgcgatatgaaaacttataaaaaatatgaagatatacctaaaaaatacagatttgatttagactatctattagaaggtagttctattgaagacaaacttttatctatggattcatacattcaacaactaattgaaaacaaagatactcaatttgattcagttgataaatttttagaatataagaaactttctgaagaattttctatttttaataataaagtatttaattacataagtaacaaattaaatacaaatttagtagaaccacaaatgaataaattattcggtcaatataaatttaaaatgagtaacttttactcagcattaggatcaattcaaaatttattttttgctaaaaaagatttaataatgcaatgaaaagatgatcaaagagttgaaaaatacaaattagaaattcaaagatatcttgattttgaaaagcacagattaggaaatgaagttgaagagtacttaacaaaaacttcttttggagacatttccttacagtctacttttgctgtattaaataactctgaaactaagttcaaagatgtaatttcttcttcaaataagaagcatattttaacaattgctacagtttcacagctattaaaaaacaaagatgaatctattagaaaacaagcttataataattatttagatggttatttaagacataaagaaacatattcatcattactatatcaacacattaaacacaaatctgttgaagctaaatctagaaattttaattccttgattgaatattctttattttcagatcggattagtgtttcattattagaaaatttattcaaaagtgtacaaaaacatacaaaaatttatgataaatttaaaaaggcgcggaataagttcttcaaaattaagtttaacaaacctatgaaggattgagataacaaagtttcattagtaaaaattaaagaaaattatactattgaagaagctcaaaacttagtgctcgaagctttaaagccaatgggtaaagaatatagcgatatgattaaaaaatcatttaaccaacgttgggttgattataataatgttcctaataaaagaagtggcgcgtattcaattggtgcttcatacggtttagataaaaaatatattttaatgaattatgactttacttttaattcagtttcaacactagcacatgaattaggtcattcaatgcactcttattattcagatacgagattaccatattcacaagctagttatccaatatttttagcagaaattgcttccatttttaatgagttaatgctagtagataaagcatttgaaaattcaaataatgatttaaccaaatttaaattattagaagattcaattttggaattttatcaagtagtgattaaacaaacaaaatgagcagagtttgaatttgatatgtataatttgatagatcaaggtcaaccaattaactcatatactgaaatcgagaaggtttatgctaatgtaatgaataagtatgaaaatgaagaaaataaagtaaaaataggtaataaaagcaatatttactcagtaattgttcctcatttttattatggttattatgtatataaatatgctataggatatattgttgctaatgtatttttccaaagatataaacaagaaggaaaatcacaattagaaaattacatcaataaattcttatcagctggaggttctaattgacctgcattagtattaaaagaagcaggtatcgacttagaagatcctaaaatttatcaacaagcatttagtatactcgaagataatgtagacaaatacattaaactaggtaataaactatttaaaaaataagtgtttaatttctaacataaagaaaataaattaatttttataattactaggaaaatatgctaataaaacctttattagtgagtttttttatgattttacaaaggaaacaaaatgaaattaaaaaaattacaatgaaaatttaaaaatacaaaatcgaacatcgaatttgcttcagaaaaagaagtaaaatcactttcgaatctacatattgataataacttaataaacttaaataagacccatattaggcacaaaacaacattttgagaagacttattttcaaaggattcatttataataaaattcttatgaaaattatttaaaataattcttgaatttattgttgttgcctgaatagtaataactcttgtgtttttcctaataaattctactccaggtgaattaggaattctaactggattatcagaagcgcaaaaaaaagctgaacttgcaaaatacgggcttgacttaccgctaattcaaagatattttaactatctatgacactttattaattttgattttggtatttcaatgacactgagacctagagttgatattaactcatttatttgacaaagatttttaacttctttttctgtgggtatcttctctgtgtttctaacaattgcaatcggagtaccacttggaattttagtaggaaaaaatccaggaaaatttttagataatttctctactgtagcaattgcagttttttcttcaattccttcacttgttttttctttaattttattaatcataggaaaagcaattaaagtaccttatgtttttgatgtccaagattttgctacatatgttctacccgccattgctctttcgataggttcgatagtttcatatgttagatatattagatacgaattaaataatgaactaaactcaatgcatgctaaattcgcttatctaaaaaacttaaccagaaacagatttgtttgaactcatgcactaaaagcttctttatttccaatagcaacatttttccctggagtagttttaggttcatttgttggttctgtgtttgtagaaaaaatattcttaatttcaggatcaggtggaattttaattgatgcaattcaagcaaaagactttaatataattttatttttagtatctatttattctttattaactattatttcctatacattaagagatataagttatgaattactagacccaagaatcagaagaaaggcaagataatatgactaataccaaacaaaattctattagcgagtatttaagacaagttgcagcaccaaatgcagttttacaacctttagcatatcagcaatgaaaattgatgtctaaagaagcagaagcatttgatcaaaactttttccaacctcaccaaaacgcttttaaagactttatcaacagatttgctcgttcatttgctggagtatttggaattgtaattattttctttttaattgtattagcaattattcttccttttactacaggagatccaattgaaacaagaccagatcaaaaaaacttaaactattttacagaagggtttatttttggtacagataactacggtcgtgatgtttgagcctttttatgacatggacttcgtttttctttaacattaagtattattgtcgctattattgaagttgttgttggaacattttttggtgttttgatgggacactttacattgtttgacaaaatatttaccttcataatcaaggtagtttcaaacgttcctacaattttgattttaattttgatgacattagttttaagaccttcattttgagtattagtttttgcatttaacatcacaggttgaatcggattagctaatcaagtaagagcacaagtaaaaagagcaaaaaactttacatgggtttcagcttcaagagttttaggaacaccaaatagaaaaatcttgctaaactttgtgccattaattattccattgttaattacaaacgtagtttttgttataccaggaacaattttaggagaaacaggattagcatttattggtctttctttacaaacgtaccaacattaggaaatgctataaatgatggtattccaattgttactttatatccaagatatgttttaattcctgcctttttattaattctattaacatcagcagttcaaatgattggtaacgcacttcaagattcattaaggagacaaagataatgcaacatacaaaagattcatcttcattaaatccaatgcttaataaagtagatttaaaacttgaaaaaaaattagaaaaaaatgttgctgatttcgcaagtaaatatcaattaattgaaaaatctaatgaatcagaagaattaaaaagtaaaaaaattaagtcactaactgataaatttaaatcaaaagaatttgctcttaaacaaaaagctacaaaacaaaaaagaagatctcaaaccccattttttaaaagaatttttaatcgttttcatttagcttataacagaaaacattttgattttgattcttttgctaaaaatgtagaatatcaaaattttgcttcaggaaagaagaaaattgtagcagaaattgataatttaagactttcatttactaatccagcaatgcacaattatcgttctttagtaattagaaatacttcaattaaattttatgaaggagaaattcacgcagtcattggagaatcaggttctggaaaatcagttattacttcaactttatatggtctaactggaaataatgctgtaattgaagaaggaacaattaaattatttaacaacgaagtacaagatttttcttttagagattgagagttatctaactatcgtggtaaagtaatttccgctgtctttcaaaaccctatttctactttaaatccaactaaaaaagtaggaaaacaaattacagaaggaatgttaattaatggaattgctaaaaccaaatcagaagcaaaacaaaaggcaattgagtatctaaaattaacaaaaatcaacaacccagaacatgttatggaattatatccgcatgaattatctggaggtatgatccaacgtgtggttatttcagcgatcttatcactacaacctaaaataatcgttatggacgagccaacaactgctttagatacaaccgttcaagcgcttgttttagatatagtaagagatttacaaaagaagcttaaaatcacaataattttcattactcacgatttaggggttgtagcttcattagcaactcatatttcaattatgtatgctggacaagtaattgaagaaggaacaagagatgaaattctcaacaatccacaacatccttatacttggggattaattatgtcaatgccagatgtaaataaaggagatagactttcaacaattcgtggtgttgtaccttcttctttaaatgatatagtaggtgatgcttttgcagttagaaatgattatgctcttgagcaagatttttatgaagaaccaaaattttattatctttcagaaacacatagagttaaatctgcacttctagatccaagagcaccaaaagtaacaccacctaaattaatagctgaaaaacacgcaaaatgagcgcaaactcatcaaagaaaatttaactaattgctttaaaaataaaggaaaatatggaacaaaaatattatctagaaaaaagaattaaaaaatttggcatcgtaaatcaaaccatagctagaaaactaactaagggtactattgaaatgctaaacgcctttccagaaaaagaacaattagttaaatttagaagtgtagatatcacttatggaagtggtaaaaacgcccttaaagctatttcagatttaaatttaaatatatacaaaggtgaagtactttctttagttggtgaatcaggttcaggaaaatctacaacaggatctgctttagctgctctaacttcacatagttttggttctattactataggaaatgaagtacttccacataaaactacaaaaatcaatggtaaattaaacaattatttagtagcaaatgtgcagatgatttttcaagatccagttagttcattaaatccacataaaaatatttttaaagttgtatcagaaggaattgacaatttagaactaaaaacaaaaggtggaatcaaaagtatcttttttcaaaactttgacgaaaatgtttttagatcagtcgttgatattcttacaaaagataataactgaactaaacaaagacaagaaaaaacattaaacgatttttttagcttaattgaaaataataaacaatatgctactcaatttttatataacgaatttatcttttctttaacagataaaaatgttaataatgcttctgattttgttcaatcttctctagaaattagaaaacaaaaagaaggattatctacagcaaaattaaaacatgaacttattttagaaatgttaaaatctgtaggtcttgatgaaagtgtattaaagcgttttcctttagagttttcaggaggacagcaacaaagaattggaatttctcgtgctttagttttaagaccaaagttattaatagctgatgaaccgatttcagctttagacgtttcaattcaagcacaggttattaacatttttaaagatttaaaacaaaaatataatctaacaattttattcatttcacatgatttacgtatggttgaatacatctcagatagaatagcagttattaacaaaggaaaactactagagatcggtccaacaaaagaaattatgaacaacttcttacatccgtatacaaaatcattaatggaagcaattcctactattgattctaaaggagaatcactactaggctatatttatgatccaaaaattcatgaatattcagatagagagcaacctgaatgaataaacttaggaaacaatcacttcgttttagctacaaaaaaagaagtatctgaatgaaaaaaaggagtttataaataatgaaaaaattaacgtcaggggcaaaatttataatagctactactagtgtagtagcatcttcagctgcagttgtcggagggattaaattatatggagaacacaatgaattaggtgtttaccatttgcagttagaacaaaaagattcaaatgctgttgaaaaatttggtcaaattcattctgcacaattccaagacacattaggaaatactgtcgctgattttaattacacattagatgcaaacgatcctgacaacaaagattcaatggttatattaaaacaaagagtcaatggaaaaatgacaatgtccgttgatgattttcgtttatgatatttaaaaactcacaaccgtcaaactcctaactttgttgtaaaaataggtttaatgacttttatcaacgaatattttgaagctcttagtccacaagagtttgttgattatgcaaaatgatttattgaaaacgtttcttgaggtccagaaacactttcactttcttcgtttactcttaaaaaaggtgttattctaaatggtaatgcaattactttaggtcaacaccaaggaaaaagaaaagaagaaacaaatattactttctatccagattctttctttggatcatttcctttatttaccaattcagcaggtagaggtaacgaacctgatagtttaacatatcaattaaattcaaaatctttttcaaaagaacaacttcaagactatattaaaacaattccactaagattggtaatagcaaactatgaagacaaacttacatctggtggattcgttggtcttgatttattaaaaggtaaaaaattccacagatacgatcttagaaaagctttaattgatacattaacaaaagcaaaagaagcacaaaaaacagttcaatctcaaactataaaaaacaaacaactagtttatacaaatggttttaacgatcctgatttaatctctgttaaagaaagaaaatctgatggaagtattaaagaaaaagttgtaaataacgttcaaaataaagaagaaaacaacgatatttctttccaagttgattacaatgaattattaaaaaaagttccacaacctaactcacttgcaagtacatatttttatgtttttagtgatcaacaagatgaaaatttaaaactttcagaacttagacaaaaattttctactgctgtatatctctatgctaaaaacaacaaaataagtatggcaaataatccagaaattgttttagatgatcaacaacttaaaaaagaatttacagttgaaaaaataattaatataaatagagaaagaggatctcaaacttatcgtcttcttgacaatagatcaggaagaaatcaagaaacagttaattttgttctttcaaatcctgattacaatccaaaagaagaaagaaattttaaaaatagaaaaactgttgtttttactttcagacctagaattacaagacaagcaacagccactaataatgacgaattaaactcattaatgttagctgaacttatcaaagaaacacaaaaagacctagaaaaattgtctaaaaatggttttagaaacttctttaatttaaaccttgcaaaagataaaaaagtcttcttatatgaagataataacactgtaaatttcttcaaatctaaacaagatgcacaagataattttagtgaagattatgacgctacaaaaataaaaccatacacaattattaatgctgaaaaacaagataaagatcacttaaatattaagttagtagatgagagcaaatactctgagtacttaaaaacttttaattctaataacacttttgcagaaagattaacaaaagctgcaaaagacttttctgatgtaaaaaaaaaatttaaggaattacaagtaaataaaacagttcagagtttaggttcatatagtcttgattatgttgattcttctcaaaaagtcaacataaataaagcacttttaattcaatttttaaaagacaataaagaccaatttgttaaactttatcaatcaaacaacattgcacatgttgaaaatttagataaattaattacccttttatcaaaagtttgagatagacaattagctgaatatgaaataaataacaattatttatctacaaatgcagaagacgatacattaagaaaaataacttcaacagataaagaacaacagattcaattaatttctgaatttgtaaacgcaagtgttaatttgctagaaattctagatcaaaaacctactcctaaagaaaaaacagaacctgaatttttagtagaaagacaaatagatttatctgaaacaaatccaaatttaaaacaagcaaaagaagagtttagaagctttaaatgatcaatcgattattttgacagaatcactccaagaatgattagagaaaatgatgagattgtaaataatcagccaactaaaacatatactcttttcttagattactacgatagtttaattgacacaattttagaaaatgatccatatgttgcaaaagaaattaatggaacttacgtaaatcaaagtattgatccaactacaggtgagacaaaatatactttagaacaaggaaaatacaacggattttatccttcagatcgtgtttccttcatttctcttcttaaagcaagttcagacaagttcaaaactacaggaattaactatctaaaatacgttggacaacatgagtatggacaccaccaaactcttcaatatgcacaaaatatttctgaaaaatctaaattagttcaaagttctgcactttccagtaatggtattgcagttgaatctttatacaacaaagatattcttcaactttatttagatgcaaggtcttcaggtcttaaaattagaaaagcagatgctttatatgaaccttcagataaaggattgtattcaaactatactttcaataaagcaaaagatgatacagaacaacgttgagaaaccgaaaaagatatttttggtgcaacacaagatcaacctgcagaagatgttttagataataaatcaagaagatatttacagtcttttgataatttaaaaactgctgcagacttaagaaatcttaaattatacgacttgtatttattaaatgcatttgactttgattctggaacaataagtccgcaaattgtaggaaaatcagaatattttagactaggtgatgaaatagtttctagaatagcaagtaaagaatcttttgctaaaaatagagaacttaatcttgagcttttagaaattgaaaaaccagtatctgagcaaaaactcaacaaagaacaatttgctgattttgtttctgatttcttagaaaatgttttagcttcagctacaaagaaatctgaagaaaaaacagtagtagtttcttttgataaattaaaaactttattagaaaaacaatacagtattattgaaaatgcagacattaacaaagactttagtaaaaaacaagcaggagatatttatactgcaaaagttaaaagaacactaacaaaattctatgctttacaaatcaaggatttttcttcaaatataaaggatttagcttcagaatttaaagcatctttagaacaatttaataaagaccatccagatttaaaagcagaggatttgacaaaattaacaactcctccaacaacaactaaaccaggaaaagttaaaccacctagtgttgctgatttaagtaaaaatttaaaaactctacaactattaactaaaaaaatacaatatgaaacatttataaaaatagagaatttaatttcgcaaacttttgaaaaattaaacgaatctctttctattaaatcattaagtgctgacgctatattaagctcaacttctagtgcaaataaaattcaaacagtttcagatgcacaaaaatacagcacagaaaaactagaagaattaattaagaaagcaaaaaataaagaagcaggatttaatacaatttcagaagatcaaattaaaagtttagaaaatacaattaaaattttaaaatcttctgcaaactcaactgcaaatagtaaaatcaaaattcctgccgtgttaattcctgttgatccagttttatctgaattacattttgctatattttccttgcttggagcattacaacaagaaattagcgatttaactacatcattaacatcagaacaaacaaagatttcaactttaaaatcttcaaaaaatcttttaaatgatgaacaaaaacagcaattaaatgcttcagaagctaaagagcaagagcttcaaactaaattagaaaaatacaaccatttactaactaaagtaaatgaaataaatttaaatctttttggggaaaatagccaaattcaagaagttaaagaccaaagtcaaggatttattgctggtgataatgttaaagaactttacaacaattctttagttgatggtaaagaaaatataattcaatttgataaagatggacaaataattgctggaacttatgaaacatatacttctttagatgatccaactaagactaagtttaaaaactttgttccaaccttattttataaaaatggtaaacctttaattgatattaattcttttgacgacaagacttcattagacgagttaaaacaaaaaattagagatttaactaaaaattttgtagacaaattagatatgaattacagcaacaatggttgagataccggtgttgaactttcaacttctgcattttcatttagtgatggtattgctaattcttcttcaccagctacaaaaagtaaatattgagactttttaagccaaatgttaggtggtgagtacaaagaattattttactcatatgacgattttaaagatctaaatgaaaaggatttatcttttacatttgatttaagtaaaataaattcagattacaaagttacaaatgtttttgatattgttaaaaaagtaaaagatgattatatatctcagaataaagctgcagatacaaaaaaagaagaatgagatcaatatttaactaacttatctaaagaagataaagcatcagcaactttacaaactttaaaacaaatttcacgcgatcctaatttaactattgaaaaagccaaaggtagaattagagaaattcttgatagttttgataaagcaaaagaagctaataaacaaataatagcaaaactagaagctggattaaagtctttacaaagtaaagggcaacttgataaatataaagattctgttttcggaaaaacacaaaaaattgcagcatttaccaaagtaaatagagaagctattgacattaaatctaaagaaattactaaagctattcagaaagcagaacagaaactcaaaagtcaacaaagtatattatctactgtttctcatagaacaaataattcatctttagaacaacaaataaaactaaaacaacaacagcttcaaaactcaactgatgaagcaactaaaaactcaaaacaagatattattaatgcattacaaagaaagttaaattttaacagtcgtttaaatccagattctgttaaaaaagatcaagaagcacttcaaaaacaattaaaagagcttaaagatcaaaaagcaaaatatgtagataataatttctattcctatctgccaaaaacagaaaccttcactttcagaaacaaagatgaaaacggaaaagtctttgatttagatgcatttaaaagaaaatatgagttttttacttgagaaagttttcaaaaattaactaaagaacaacaggatgcattaaaacaagattctttttattctacaaaagattctaaagatttatttagcgaagtaagtgatttacttttactaaaaaattcttcattttacaagctaatgaacattgttttatacattgcaagacaacaacaacaagttttacaacaagaattagaagcaagagtaaatcaacaaattcaagcttatagaatacctgatgaagctaaaacagctatcaaaaaatacattgatgaaaaaatatgacctttaacaaaagtttttgatgatttaattgcaccaaaaattcttgataatataaaaatccatgataataaaacaaataaagaaataaaagtttctgagattaagtttttaatagagatgatgaagaaatatttccattatctaacatttggaaatcacaaacctcaaactttagtttcattaacagcttcatcaatgccacttggaaaagtaattaaattaggtgaaaatgaatactatcaaaatcctaaatatgattacatagctaaagcaatttcttctaactctaaagtagttttagatgcaacccatgtagtaggagatgaaggaagctctgacgaaacagatgcaacaatgtctcctttatgaaaattactaaatttaaattacaatttctttaaagacaaaatttctagaattgttaaacaaaaagaatttttaaactacaatcaaaaagagatagtaagagacaaagtagaatcaaaagaattaacagaaaaattctttggtcaaaaaggtgaatttgccttcaaatctaaagaagaaaatggaaaaaaagttcttgataaatcacgtatttaccttgataattgaagcaaagatgagtttttcgatcaaaactttttcgttaaaagtaaagaaaacgaacaacaaacaatctttacgactttatcttcatttatagaatttatttctttagatgtttttaaatacagagttgctcaagatgcaaaccaaaatcttcaccgtaagtgagatataaactatgctcttactaaatttgacttgtacaacttcattttaaatgaagagaaaaagcctatttttaaagacgattttagtataaccacagaagctgacttaattgctaaattaaaattagttttaactgataaaacagaagaagaaattaaagatatagttcaaacaactacaaataacttgatggaaaaatttgaaaaatcttcttttaatttattgattaaaaaccacaaatttagcaataaaaacatagatcaattattcctaccagaattaggatatcaaggatttaatactcttgaattaaacagaggtcaagacaaagcttcaaatggaattgatgctttatatgatgtagactgaagtatttctagttcaaaaggtaaatgattagattactactcacaaatcgcttcaacaaactcattaaacttagataaagaacaaattttagaatctgacattgaaaaagatggacaagattctgattcaagaattcaaaaattaattaaaagatttacaaaagataaacaagtagatctttcaaatgcttcactttttgaacttcaatatctaattggaacaaaaaatattttaacctactcagaaacacctaaaaaaagctaccaacactgaaatgagctttttgacaatggtgttagaagaagtacaaccgattttaatttatcaagtgtttcaaaatacaactcttcaagatttgaagatcgtgttggagattatttctcagattatgtttataacttcgcagaatcattaactagagacttggtacaaacaacatttttaccttctgctaaaacattagaaaatcttccttcatatctaaagggattttctgaaaaaaatacaggatatgaatactttgtagatgaatctatttctaaaaaatgacttcaatcatatacaaatccagtttctttggcacaaggtcaaggattaggatatgactatgtctcaaatgcttcaattgcacagacatatttaacaatgtttaatactgatttaggtaaacattattcaaaattactatctatttatagaaaaagagctaatgaaaaacaagtattaattaaagattcaattacacaaagattgttaaatcaagttaatggtttaaaccaaaaattcaataaatttagagatgataaattaaatgactacatttgagctgctgatgataaaaaacaaaaattattagatattaaaaaagaaattaaagctgcacaagataaaagagatgaagaagtagaacgtctaaaaaccatagcaactgaacaagaaaataaatacattactccaacaatttctgctttagatgatgtttgaagagaattttatggtgaatttggatctagttcttcttttgcacttgttggaccaaaatcaacccttgcaactaatagagcaaccaatcaacaaagacgtgtaagacgtgaagggtacattggaagaagtaattgatcaaacaacggatttttcaaagatcgtttccaaagaaaagtacttgactgacaaatttatgatgaaaatcgtgaaccagttaaagacgataatttagcaatcaaagatcttaaaggaaacaaagtagaagatagagcttctgctgtttgatattacacattagaatctcaaggtataggaaaacaaacaatttcagcaatctgaagagacaacaaaagagatcaattagtattttgaggttataacaaaaaagaagaaaatgacaaaattaaatacttagcatttgaagatgaatctacaggtcaaagatatttcttagaagtaaacaaaaagaacacaaacaacattttctacttcaaaaaacaagcagatgtgtcttcaaaatgaacactagaagatgaaggttatgcttcttgaacaacaaattgatcaattttatctacattctctaatgctttaataagtcctggagttaaaggtgaaaaaagattaagagctttctttgcagatgaaaacaaaaacgaaattaaagacttattaaaacttcctactgatacaacttacttagcagaaaatgggaaaatttatacacaagcgcctgttttcttagaaaaaacacaagataataaatattacttaacaattaaaaaccaatttagttaggatttaaaaggataattatgagcatatctaaaaaaattaaactattacttagttctcctttgttagcaagccctttgctagcgctagcttgtgtgccaactgattctaaaaaacttgttgaagcaaatacgcttaatgccactaatacagtttctacaagaagaaatggaaatgattttggtattgctgttccttcaattagttctttaaactatatcaaatcagcttcagcaaacaagatattaccttcattagttgaaggtttaactaaatcagcgccagcagcaaacacagctattggtaatatattaaaattgcctacaattagcttcgaaatttattcaggtggtaatggtgaaactgtagggactaaattattagaaaacaaaaattctatcaaatctcaatcaagaacttatactgtttctaactttggagtaacaacaggtgttttagctccatctacaaacgagaatccttcttttatcggtgttttaaactcagaaaataaatatgtatctcttttatctcatttaaacaagggtgcttcaaaatgatctaatggtgataaagtaaaagcacaagattttattgatactttattatatattttagacactaacacagcttcgtctagattaaatgaattactaacaatgagcatcaaaaacgtaaatgcaatgaaggaaattcaaaatgattaccttaaaaaattcgggaaaatttattcaaatccttttggtagaagacgttttgtaaaaacagaagatggacaagtaattgaagatcactcacaacatgtttatcaatctgaaaacaaaggtgatgaagaagttgtaaacaaaatgaagcaaattgcaagtggaataggtctttatacaggaagaatttttaacgaattttctaatcaacaaattagagacataatcaaaaacaatgcttcattaaatccttcattttctgtaaattctagtcaaatttcttatcttaaagatggacaagaaataacaaaaacattaacaaaaaatccattcttagatccacttcaagtatttgaaggtcctgaattaactccaaaatataaagcatttgcagctgatgaatacgatttaagaattcaatttgaagactcagcgccaaaatcatttgttgatgtatactacagagttatttcctctccaattctattaccagtgaatagaaaatttgttgaatatactttaaaaaacaaggatgatttaggttctgatttatctaaattcttatgaaacggaccttttgatattaaagagttaaaacttggttcacaaggaaatatgaccttgacaaaaagaaaatcttattactcagtcgaaaaaacagttcctaatcaagtcaaagtttattttgctgatcaaccagaaacactatctaacttattttctgatggttatatagcatttactcaaatttcaccagcttttcaaaagaaattttgatctcaattaagcgctagaaaatacatgagaaaatctcaaggttatggaacaattgctcttcaatttaatttagataattcaaaaagaggaaatagttatttacaagatcctgatttaagaaaagcaatttattatgcaatagatcgtgaagcaatgctcaaattagcacaattagattcttcatttggagttacaacttgaacagcttttggtcaagcaaaatcagagcgtggaattaatttagaaacattttttgatactcaaaaatttaaatcagagtatgtagaaaatggacaagaaaaagaatttccacttcagtctctagaatttgtagatcacttagcaaaatcatacaactttgaaaatttatctagaaaagatccttcatatgatgttgcaacagctaatttttatcttgatagattcaagagaaaatatccgaaattaaaagaagttaaattagagtttatctacacttcaggtccacaaactggaattgcaattggtatccaagacttaattaatagagcgtttaacaaatttattaacattgatatagtagctcttcctgaaaacatttacaaacaaagaataattagtggtgattttgacttaaccacacaaaattttgatacttttggatcaacagctcaaggatatataacagcgttttttactcctgatgaaataaatccagtagaaaataaactaaatggtttagtttataatccagcttcttcatttacttatcaaaattgatgaaattcaatggatgaagaaaaacaaaaagaagtagttcaacgtttaggcattaaaggtaagtttttatctaaattcaaagaacttattacaagaaaaatgaaattagacccaaaaactaaaaaaccaataatgacacaagttgtttctaaaataaatggaaaagacatagagtatgcaaaagatatgaatggaaatgatattttagttcctgtttttgaagaaagtacaacagattacagcgcaagaattaattcatttttcaacggagtattcacacctaaggaaatacatgaaaaatgaaattcattagaagtgtttaaattaattgctgtatttgaaaaaatattaagagaaagcgcacccgtagttcctttaatggaagttgatacttattgaactatttcaagactaagaggtgttggaaataccttcacatttgcacttcaatttgcatttgatattaacaacaaccaatatggtttgccagtcgaagatgcataaaatctattcataaattaattaaatatgaaacagttaaaaaagaaaaaatatcgataagtttttataattcaaaaataaaaaaatatttaaaaaataaagaaaaatgaagcaaaaaccttattaaaaaatacttcgttttagctacaagaaaagaagtatctcaataaaaaaaggagtttaaataatgaaaaaattaacgacaggagcaaaatttataatagctacttctgcagtagtagcatcttcagctgtagtggtcggaggaattaagttatatggaaaatataatgaattaggtgtttatcatttacagttagaacaaagtgattcaaatgctgtcgaagacctttccaaagtaagttcagcagaatttctagattctgttggaaaagtagtagctaaatatgatttcaatttaaaaaatacacctgaaaacaaaaattcaatggttattttaaaccaaagagtaaatggtaaaatgactatgtctgtagacgattttcgtttatgatatttacaaaattacaatagacaaacccctaattttaaagtaaaaattggtctaatgaccttcataaatgaatactttgaagcattaagtcctcaagaatttgtagactatgcaaaatgatttattaaaaatgtttcttgaggtcctgaaactctttcactttcttcatttactcttaaaaaaggagttatagtaaacggaaatgctataactttaggacaacaccaaggaaaaagaaaagaagagaccaacattactttctatcctgatgctttttttggttctcttcctttagcttctaattatgcaggtagaggaaatggtccagatagtttaacctaccagcttaattctcttgcttttactaaagaacaattacaagaatacattcaaaccctccctcaaagattagtaatttctaactatagagatgaatttacagccggaggtgttgttggacttgatttgttacaaggtaaaaaaattcatagatatgaccttaaaaaagctctagaagatacattagaagcagctaaaaaatctgcaaaccaaaagacaagaaaagaagtaattaaacaagaacaaaaagtatttgacaatgctttaaacgatccggatttaattgctttaaaatcacctaatacagatggatcagttaaagttacaacgacaactagtacaactgaaactaataatgcaaatcaagatattgaaattaatataaactatgataatgaattaaaaaaaattcagtctttagattcttcttatttctatgcttttagtcaagaaaaagacccagctaaaaaacataatgaattattgcaaaaatttacaactgctttgtatatttttgctaaaaacaacaacattagcttagcagataatccgcaagttgtctttgataatgcacaaattgacaaagaatatacaattgaaaagttgattaatagacatagagaaagtggttgaactaattatcgtttatttacagaagacttcaatagacctgatgccttagaaactgtggattttgtattatcaaatccagattttgatgcaaaaaaagaaagagattctaaaaataaagaaaaaattactttcagttacaactttagatataaccgttcagctactggttcaaataaagatgagttaaattctttaatgttgcttgaatttatgaaagaaacacaacctgagttggaaaaattatcaactaatggttttagaaatttttataacttcaaatcaacaaaagataaaaccatttttatgtatgaaaataacgatgcagttacttttcaccaaagcgttaaatttgcacaagataattattcagaagactttgatgttaagaaattaaaaaaagtttcaatagtagatgtaattaaacaagataaagatcatttagaaattaaacttgcagatttagaaaaatatgaagaatacttgaaaaaatttaatgaagataaaacttttgcaactaaattagataatgctaaaaaagctttttcagatgttcaaagtcaacaaacattaaatggtaaaaatatagcaaatttagtagctgatgctattgctttcaacgaagaaactcaagagttagaaatacaagatccttcattagtttcattcttgaaaaaacatttagcaaaactaaaagagttttacactaaacataatatcgaacattcagaaaatctagatttatttgtttcacaattagagacaatttgaaataaacaattagacaattttgaaattacaggaaatttcatcgaccctactaatgctcatctttcatctgtaactgaaactgatttagaaacagatatttctttagtttcttcatttgttgacgctactgtttcattgatcaaaactatcgaagaaaaaccaaaacctaaagaaaaatcttcttcagaatttacaatttctaaaattatcaatctcgcaagcgataatcctaaattaaaacaagcacaagaagaatttagaacatttaagtgatcagttgattattttgatagagtcactccaagaatcattaaagaaaatgacgaaatcattgatttaaaacctacaaaaacttatactttatatcttgattactacgatggcttaattgatacaattttagaaaacgatccttatgtagcaacagaaatagatggtacacacttagaaacttcaatagattcagaaacaggtgaaattaaatataaaatagcagatggaaaatatacaggattttatacaacagatcgtatttccttcatttctcttcttaaagcaagctcagataagttcaaaactacaggaattaactatctaaaatatgtaggtcaacatgaatatggacaccaccaaactcttcaatatgctcaaaatatttcggaaaaatcaaaagcagttcaaggtgctgctctttcaagtagcggaattgctgtagaaggtttatacaacaaagatattttacaactctatctagatgcaagatcttctgggcttaaaatcagaagagcaaatgcttcatatgaagaatcaaaagatggtttatattcaaactatacttttaataaagctaaagataaagaagctcaacgttgagaaacagaaaaagacatttttggttcacttcaaaatgagtctattgaaaatttaattgataataaatccagaagatatttacaaacttttgggaatttaaaaactgctgctgatttaagaaatcttaaactttatgacttgtatttattaaatgcattcgacttcgattcaggaacaattagtcctaaaatagaaggaaaatcagagtatttcaaactaggtaatgaaatactttctcgtatagctaatgaaaatgattctgtttcacatgatccaatagaactaaaagatttagatgttcctaaacctatttcaaatacaaaactagacaaaaatcaatttacagattttgtagatacttttcttgaaaaagttctatctgcttcaataaacaaaaacaaagagaaaaaatccagtgtttctttttatgatgtaaaaaatattctaaaaaaagaatttaacattgtatcaaatgcaaaagttgatgaaaattttacaaaagaacaagcagaatctatttatcgtgcaaaagtacacagagcacttgcaacattttataaagaaaatttttcttcattttccttagtaattcctgaattagaaaaagagtttaaacctgcatcagaaaaattagcacaagagctaaaatcaatacaagaagaaataaaaaaatcagaccctaaagcgccaatttctgaaaaagaacttgctaaaataacagaagttgcaaatcttcaagttaaaaacgttatttatacaacttttttaactagtgcacaaaatttacttaaattaatagcacttttagaacaaaatctcaatgtaaaatcactaacagttgaacaaattttacagcaagtaaaaatagaaactttaggtgatttacaaaaatatggtatccaaaatcttgaaactataattactaaagctaaaaataaagaaacaggatttgaaaatctttcagaagagcaaataaaattattagaacaaaatgttcaacaattaaaagaaacttataaacaacttagccaaacacaaaaagaagatactaaaatttctgaaggaacttttccacaagatattgttttacttcaattaaaatcagttgttgaagttctttttaatgcacttagtttagaagttgatgatttacaagcacaacttttagcactagaaaaacaaatcaaagaaacagaccaaactaataaagaacaattagataagttaaatcaaacaaaaactgaattaactaaaaaaataactgattttgttaatagtaaaaaaacagttgaagaaatcagaaacagtctttttgaagactacgaagatggttatgttttaggtggtgatatagaaaaactttataacaaatccttattagatggacaaggaaacttaattagttttgatcagcaaggtcaaattattgcaggtacatttgaaaaatatccttctgatacaaaggtaggtgagtttaaatttaaaaacttcaagccaacattattttataaaaatggaagaccattaattgatatagatacattcaatgatcctacatcatataatgaattagaagaagcaataaaagcattaactaattcatttaagtctatgttagaagtagattatgcaaataatggttgagattcatctgctagaatttctacttccaactttacaatgagtgatggagttgcaagcgctaacagttcacaacaaggatcaagtaaatattgaagttttttaactcaatttttaaatggtaatttaaaggaatttttctactcttacaacgattttaaagactcaacagaaaaagatttaagttttgaattagatttaagcaaaataaatagttcaactatgaatgtaagcgaagaagtagaacaaatagtagaagctagaataacatcgcttgctaatctttcaagatttagacctgagtataaagctgagtatgtaaaattagcaaaatattctgaacaaagcaagaaaaccaagtcagaaaataattttgaaattaaatttgattcttttactaaacattacagaaataaactaaaaacttctagcccaccaaaattttcattacctgaaattccttcatttgattctcttaaaaatagaaaatcaacaacaacaaaatctaaaactccagcatcatcttcgctagcagcagcattgctagcagatgctcctgcatctttaactactacttcaacaccaactaaaaaaacaacaaaatctactaaaaacaccaaaacaacaccatattataattttccagcaacagataaaatcacctttagaaataaagatgaaaatggaaaagtatttgatttatctacatttaaaacaaaatataaatactatacaaaaactcaatttgataaactatctgaaaaagacaaagcaatattaaaacaagatagtttatattctgaagtaaaagaaaaagatttatttgctgattttagtgatttagtttcattaagaaattcttcattttataaattaatgaatattgttttatatattactcgtcaacaaagaactgttttagaagaaaaaattctagataaaatagaccaaacattaaaacaagtaggtcaagcaaaattagatagaaaatattcaatatataaaaactttttacctttatctaaagtatttgatgatttaatagcaaaaaaagtcttagatgctattaaaattcatgacaataaaactaataaagatattcctctttcagaacttacattctttattaatatgttaaaagaatatttcagatacataagtgaaggatcattaagacgtcagccattactatctttaacaacagcttcaatgccagtggcaaaagtaatcaaaattggagataatgaatattaccaaaatccaaaatacgattactttgcaaaactaggtggttctgatactaaaattgttttagatgctacatatacagcacctgtagaaacagatcctacaaaaatccaaagaacagagatttcacaaattaaatcttcattatgacaattattaaatcttaattatgatttcttagaaacttcacttaaaaagaaagattcagccggaaaagaaatcaaaaaagatttaactttgaaatactttggtcaaaaaggtgaatttgccttcaaatccaaagaagaaaatggaaaaactgttcttgataaatctaaaatttacttagctgactgagataaagaagagttttttgaagataatttctttgttaaagataaagaaaatcaaaaagaaactatttttacaagcttaagttcatttatagactttatttctatagatgtttataaatttaacattgcacaagatgtaaacctagatctatatcgtaattgaaatgtagattatgctcttacaaagtttgacttatataattacattttaaatcaagaacaaaaaccagcttttgaagccgattttgctattaaaacagaaaccaaattaattgaaaaattaaaattagttcttagtgataaaactgaagaacaaattaaagaacttgttcaaattacagcaaataatttaatggatgtgtttgaaaattcttcatttaatttattaattaaaaacaataaattcagcaacgtaaacatagaccagttatttttatcagaagttggatataatggatttaatactctagatttaaatagaggagcttcagtagcttcaaatggaatagatacaatgtatcaagttgattcttctatttctgcaacgccaagaagaataggaattgactacatttcacaaattgatccaacaaatacattaaatttagatacaccatcgatcgtagaaactgatatcgaaaatagtgatccttcaaaatctagaataaataaattactaagacgttttatacaagataaaaatgttgacatttcaaatgcaagattatttgaacttcaatatttaataggaactaaaaatctatttacttattcagacttaccagaaccaaaacaaagatgaacaagacaattaggaatttcaactagatctatatcaactgattttaatttctcttcaattgatagattcaactcatctagatttgaagaaagagttcaagattacttctcagattatgtttataactttgcagaatcactaactagagacttagtgcaaaccacatacttaccttctactacaactttagaaaatattccttcatatttaaagggatttactgaaaaaaatacaggttatgagtttttggttgatccaagttattctagaaaatgattacaatcttatacaaaccctgtttcactaacacaaggtaaaggcttaggttatgattttgcttcaaatccatatattgcaaacttttatttaagaatttttgaatcagatttaaataaacaatatgctgatttattaagtatttataaaaaagcagcaaagcaaaaacaagtacttatcgcagattcaatttttaacagagaaagtaaacaaatcaaggaaaaagaagacaaattaaaagaattcgagaaggaaaaattagaaaattacgattgaatagatgatgataaaaaaccaaaaattttagacatcaaaaaacaaatccaagaactaagagacaaaactgatcaagaaattcaaaatatccaagatgttgctttagatcaaataaataaatacattactccaaccacaactcttttagatactctttgaaaaaattactatggaccttttgctcaagatagtgcatatacaggagtaggaccaaaagaaagaagagggataagattagaaggttatattggacaaagaaacttttctaataatggattctttaaagatcgcttccaaagaaaagtacttgactgacaaatttatgatgaaaatcgtgaaccagttaaggacgagaatttagaaataaaagatcttaaaggaaataaagtaactgatagagcttctgcagtttgatattacacattagaatctcaaggtataggaaaacaaacaatttctgcaatctgaagagatcatttaagagatcaaattaccttttgaggatataacaaattagaagataatgacaaattagaatatttagcatttgaagatacaagtacaggacaaagacattttttaaaagtacaaaaagaaaataccaataatattttctacttcaaacgtcaagcagatgagacttcaaaatgaacactaaaagaccaaggttatgcttcatgagctactaactgatcaattttatcaacattttctaatgcattaattaatcctggagttaaaggtgagaaaaaattaagaattttctttgcagataaaaacaaaaacgaaattaaaggattgttccacttacctgaagatacaacatacttagcagaaaatggaaaaatttatacacaagcaccagtttatatagaaaaaactcaagatgatcaatatatgatcacaattaagagtcaatttagttaaaaaaaggaaaaaaatatgaacaaacaaagaaaaattaaacttctattatctactcctttactttttactcccttattagctcttgcttgtaatcctagttctgaaattaaaaattttagtagttctaataaaaaagccagttttggtattgcaattcctccagttaactctttaaactatgtaaaatctaatgcatcatttaaaataatgccatcacttgttgaaggtttagtaaaaacagctccagcagctaatactgcaattggtaatatcttaaaattaccaacaattactttcgatatttacagtagcagcgttccagaagtattaggttctaaactattaagaaacaaaagtgcaatcagttcacaaggtagaagttatccagtagcaaattttggagttaccacaggagttttagctccttcaggacaagattcgccttcatttattggagttttaaactcagaaaataaatatgttactgtcttgtcacacttaaataaaggtgcttcaaaatgatcaaatggagatgaagtaaaagcacaagattttatagacaatattttatatattttagatactaatacagcctctacaagattgaacgagcttctaaatatggatattaaaaatgtaagagctatgagagatattcaaaatgattatttaaaacgctttacaactagttataaaaatccttttggtagaagaagctttattaaagatgttgaaggcaaaatagtagaagatcaatcacagccaattttccaatcacaaaacaaaggtgatgaagaactagttaaaaagatgcaagaaattgcaagatcaatcggtctttatactggaagaatttttaatgagttttcaaatgaagaaataagaacaattttaaaagacaataaatctttaaatccttcattttctgcaaattcttcttcaatttccttcttaaacgaaaaaggtgaagaaattagaaaaagcttgactaaaaatccatttttagatccattacaagaatttgaaggtgcagaacttactccaaaattcaaaaactttgcagctgatgaatatgatttaagaatagaatttgaagattcagcaccaaaaagttttatagatcttttcaataaagtaataagttcttctttacttcttcctattaatagaaaatatgttgaatatgacttaaaaaatattgatgatttaggttcagatctttctaagtttttgtgaaatggacctttcgatattaaagacttaaaattaggccctcaaggaaacatgcttttaactaaaagatcatcatattattctgcagataaaacagttccagatcaagtaaaagtcttttttgctgatcaaccagagttattatctaacttattttcagacggatatatagccttttcccaaatttcgccagtatttcaaaaaaaattctgatcagaattatcttctagaaggtttatggaaaaatcacaaggatatggaaccattgctcttcaatataatttagatcattctaaaaaaggaaatagttatttacaagatgcagatttaagaaaagctatttactatgcaatcgatcgtgaatctatgcttaaattatcacaattagattcttcatttggagttacaacttgaactgcttttggtcaagctaaaacagaacgtggtattaatttagaaacattttttgatggacaaacttttaaaagtgagtatgtagaagatggaaaagaaaaagaatttccacttcaatcactaccatttatagatcacttagctaaaagttataattttgaaaatgtttcacgtaaagatccttcttatgatattaaaacagccaatttttacttaaatagatttaagtcaaaacatccaaatttaaaaggtataaaacttgaatttatttattcaggtgctggtcaaacagggatagcaattggtattcaagatcaaataaatagagcatttaataaatttattaatgtcgatatagttgctctaccagaaaatatttataaacaaagaataataagtggagattttgatttaactacacaaaactttgatactttcggatcaactgctcaaggttatataacagcattttttacagctgatgaaattaatccagaagataacaaatttaatggtttagtttataatccgtcttcttcatttacttatcaaaactgatgaaattctatgacaaaacaacaacaagatgaagttgttactcgtttaggaattaaaggaaaattcttgtcaaaatttaaagaattaattacaagaagagtggaaatagacccacaaactaaacaagtaaaaactaaaaaactagtagaaaaaattgaaggcaacaaactaatttacgcaaaagatattaaaggaaatataattgaaactccagtctttgcagaatctagtacagactataacgaaagagttaatgcattttttaatggtgtatttactgcaaaagaaaaaagtgaaggttgaaactcaatagaagtctttaaattaatagctgtttttgaaaaaatattaagagaaagtgctccaatagtgccattaatggaagtcgatacttattgaaaaatttcaagacttagaggagtaggaagtgattttactttctcactacaatttgcttttgatattaataacaacgttagaggtcttccggtagaaaatgttagttagtctttactaattacaacttaatttaaaactaatcaggaatttttcttgattagttttttatattttttagtaaaattttataattaaaaacaaaggaaatactatgaaaacttataaaaaatatcaagatattcctcaaaaatatcgttttgatctagaacctcttttagagaataaaactgttgaagaaaatcttcaaaaaattgatttatatacagaaaaattagtttcattaaaagataatcaatttgattcagtagataaattcatagagtacaaaaatgtatatgaagaatttttgatttttacaaacaagttgcacaattatatttttaataaattaaatactaatttagttgatgcaatgattaataaatactctggtgaatttagttttaaaatgtcccaattagaagcaaaattaggttctattgaaaatattttctttaaaaatatagataaagttttaacttgaaaagataatccaaaagttaaaaactataaaaaagaaattgattttttaattgaatctaaaaaacacaaactttcagacgaagtagaagaatatttaacccaaacttcatttggaaacatagaattagattctactttttctattttaaataattcagaaactgaatttaagtcagttaaaacaaaagataataaatcactaactcttactatttctacttattctaaattattaaaacacaaagaagataaagtaagagaacaggcttataaaaactatttaaatgggtatttagttcataaagaaacttattcttctttgttatatcaacacgtgaaacatctttctactgatgctaaaataagaaaattcgattcgttaattgattactgtatttttccagataaaatctcaaaatctttattagaaaaattgtttaaaaatgttcaagataattcaaaagttttagataaatttaaaacagcaaaaaaacaattttataaagctaaattcaataaagatctaaagccttgagataatttagttccattagtaaaagttaaacaaaattattcagtaaaagaagcacaagatttggtatttaaagctatttcaccacttggcaaagaatataaacaagtaattaaacaagcttttgaacaaagatgagtagattattataatgtagataataaagtaagtggagcttattcaattggtggatcttatggagttgataaaaaatatattttaatgaattttgattttactttcaattcagtctcaacactagctcatgaattaggtcattctatgcattcttattattctgataaaactatgccttattcattagcttcttatcctatttttttagctgaaatagcttcaattttcaatgaactaatgttaagtgattatgtaatttcaaatactaaagatgacaaagtaaaatttagtttacttgatgaatcaatttcagatttttatcaaacagtaataaaacaaactcaatgagctgaatttgaatatgagttgtataaaaaagtagatcaaggtattccgattaattcctacacagaaatggaaaaactttatgtcgaagttttaaataaatatgaaaaaaatcctaataagcacaaagtaaataagcctacgaatatttattcagtaatagttcctcacttttactatggttattatgtatataaatatgcaattggttatattgttgcaaatgtgttttttcaaaaatataaacaagaaggaaaacaagcgcttgatttatacattgaaaaattcttatcagctggagggaaagactgacctgcacttatattaaaagaagcaggagttgatttagaagacgaatcaatttatcaacaagcattttcagtgtttaataaaaacattaaagactacatcaaacttggtcaaaaaatcttcaaaattaaacaataatcaagaaaaacaaaaggtaattccttttgtttttttatttgtgtgaattgaatttattaataatttaattaagtgttgaaatagaacgcattacaatatcgacatctttactttcgagttcatttatgatatgtaaataaactctttctgtagtattcatacttgcgtgccctagtcttttagctacagaagctatagaaacccctgcatagagcaaaatcgaagcatgggaatgtcttaatccgtgtaaggatatctgtggaatattcactgataaacattttttgtgtagaatttcgttaatagttgaattaaaaatcttttctttaaataaaaaaataggtttattttgttcaagatttaaaactaaagttgaaaattgtgaacaagtttgtcaatcaagaggtatttttcttattgatgaattatttttagtaggtaaaaaacctccattttctttataatttcaagtttttgaaatatttaacatctgttttgtaaagtcaaagtcagctggagtaacagcaagtgcttcagaaaatcttaatcctgtttttgctattaacaaaataagtcaatcgtagttaatttcagcttttaaatccagtgtttttaacaataactgtagctcaaacaagcttaaaaatttagggcgtttttttcctggtggtttcccttttactacaacatttcttgttggatcttttttgataaaaccatcttcaaatgcatctagtaaaactcttttaatatgatgatgaaaatccaaagtagtagatttttcatggcattgcgcatacatatttaaaatttcttgatatttgtatctatcaatttcttttagctttaaatcaggagctaatttgataattcaatctaaagtagtttggtattttaaaaaactaacagctctaatggaatcttttttgtataaaaatattcaatttttaaaatattcgtgaaatagtatatctaattttttcatttttcctccgtatcaattcacacaaaattgcaaaattaaaaagaaaaatgaagcattttactaaattcattatctaaaaatttaaaattactcccaataatttgagagtaattttattatattaatgttggacttattttgattattttttctgattttgcaatcacttttgactttattttcctatatacatcagctaaatttaactctcgattaagttctttttgatattgttctcagtcaatttcttgattaagtccatatacatttaaaatataattaccttgattatttgttaaataaggaatatagcaaagtccataaccatttttaatataatcaaacgcagtttcatctaagtcagctaatttagcaatattaaataaactaatagaagaaaaagtattagaaattttcacactttcttttgaatttaaagaagaaatgacattattaggaaaatctttacttctaatacctacttttactcattcaactaaaccaactccgagtgttttagtttctgctatactataaagtaaaataacatattcttgaacagaatctactttatttcattgtaattcgagctcttttccatgaaaatatcctaaatttgcaagagacataagattattaatatctaataaaaaagtattatcattaattttttcaagcgaattagaaaaaatttgaaagtctactggatgttctatagcataaaaattttgtttttctttttttaaaggagcatttaattctttaggacttttatctagtttttctagtgtataatctgcatttatttttgttttagctcgatacaaaaaagtagtaaatccttggtcaattactttattatgaattaaattgataaagtcatcatagaataaattgttattttttaattgaggatgcgaaccaaaaatatcatcaacatttaaagcataaactctaaattcatagttatgatcttgatctggaggaaaaggaccgtaataaactccattaggatgttcggtataaaatgcctttaataaataattttcagctttatcagtaatgctattttcaaattgatatattttgtctttgtgctcaaaagaaaaatctcaacttagtttattagttttaatattagcagctattcaatgaataaacacaattcccatagctccactagcttctaagtcaactagcgttattgcataggatttagcatctttaactttgcttcattttatgggaaaacttactgtatttttatattttccacctaaattagcattaccaaattgtgtatctaaaacaccatcttttacatctttaatttcaatttttatcatagttaaattttaatagaaaagtaaaaatttgcttcaaaaatatacaaaaaaccaatttaaatttttctaaattggtatctgtcatacataacttctaagacctcgttttgttttagtcagatatttaatttattaaaatttaaattggttttttgcttttttcaataataatttttttgttttgtttttgtaagattattttagtaaataaaactaagacattttaaaaatcagctgtaaaaggatttagaaaatcatcatcatcgtcttgttctaatttagtatcttgaatttcttcttcaaagacctgtggttctttttgaatttcgtaatcaagttgtagttttaaattttgtgtgttttcatctgcagagatgattaaacctactttaatattttcatctaattctggtgctaaataaattccgactgagtattcaaaattacgtgcacctttagattctaaaaattctattattgtttttacaatttcttcattttcttctatgaaagaatttttgactgaaattataataattacttctttagtttgtttaaaatcaaagtcaataattgaatcattaagtgctgaaatagctgctctttttgctctgtcaccgatatgttttccaaaaccaatgcctgagtttacaaataattttttattatttctaatggcttttttaaggatagaaaaatcgatttgcataaaagccggtttgctgattaaatcgatgatagtttttacaatatcaaagattatttggttagctttttttcatacttctgaaacaataattccttcaaattgcttttgaattttggtatttgaaattactattagcgcatctgaatttttttgtaatttttctataccttctgaagcaatagaaagtcgtttttgatcttcaaaatcaaaaggttcaacaacaatggctattgtcatagatttcagagttttggctactttagcaaaaatatgtgaagctccagtccctgttgctccgcccataccggcaagaataaatagcaacttagaatctgctaattgtgttttaatttcttgctctgctaaaagagctgcccgctcagctaaatctggatttagttcaaatcctaattctttgcttttgtcatctaataacaaagtttgtgaaggatttagtaatcttaaagtgttgccagcacttttagaatttacaaataaatatgaaatatcacgaagttgtttatttctaataaaatctactaagatatttgacccacaactacctattgcgataattttagcttttataacttggatatttgaattgttatttgtcatttttccttctcatgttatcttcacttttaacttttatatacaaaaatgaagtatttttaattttcgagctttgtaagcactcttaatttagcgcttttcgatcttttattgttttctatttcattttgttttgctcaaatggttttaactatatattttgcttgggtttgttcaaaaaataaagtttgatttttatcgagcaattttttgaaataattttttacaattttatcttctaaagaatgaaatgtaataattgctactttagaatctttgtgcaaaaatttatcaactttttctaaaaatgtatttaacgattctagttcttgatttacttcaattctaatggcttgaaaaacatttttagctggatttttcttacgcaaaataaagttaggtaaagattctttgattatatctactaattcagttgtgtaagtaataggtctgtgtttgataatattttcagcaatattattagcatgacttacttgcccataatttgtgaatatactaactaatttttctttggaatattcatttactaactcataagctgaaaatgattgagcttgattcattctcatatctaaacgagcttgtttgttgtatgaaaatcctctatttgcttcgtctaactgaggagaagatactcccaaatctagtaaaataccatctactttatcaacttgaagttttttaagttctagatcaaaatctttaaaatcagatcagataaattcgatgtttgaagaaatttgaagtaatttttcttttgtttcttcaatagcttgtttgtctttgtcaaaaacaataagctttcctgtagtaagtttttttaaaatttgacttgagtgtccaccacgacctaatgtaagatccaaatagataccatctgctttgattttgagttgttcaattacttcattaagcaacaccgggatatgttccattatagttcaaccccagcttctaataattctttttctagttcttcaatgctatttgcatcttggaatttgctttgtagttgatcaaatctgtcttttggtcaaatttctaattttcgccctactccaacaagtgtgagctctttattttgaatagcagataattcaagtagattcttcggtaaaagtactcttccttgtttgtctggtgaaacttgagctgtgttagcaaagaaaaatcttgcaaaatttctagttgttttgtttaatgagttggcttgcgcgattttgcttttaatcttgtcaaattcttcagcagatcttacttcgagtacataatctaagcttagacttatataaaatatattacccaattcttcacgatatgagcttggaatagctattctatttttttcgtctaatgttcttaaatgtgtcccgtacatatctacttttcaccactattccccactattatacactttttttacaaatgcaaagaaatttttttattttttttcaaataaaaaactcggacaattacttttttgtaatttttccgagtttttttaatgtttatttataaataattaatcttcttgttttaattttctagctcaaagtttttctactatagattcaaaatcttgattattataaataatgtcatataaagaaaaaataattggcagatctaaatgtttgttttttgctatttttattacactatctaaagctgttaatccttcaactgttttacttgtttttaaagcattttctttattttttataaaatccaaaccaaatgaataatttcttgataaatctgaaagtgcagttactattaaatctcctaaaccagtaagacccattagtgtagattctttaccacctaaaaaagcattaaattttctagcttctgataaaccacgagttaaaaaagcagcaacagtattaatgccaaatccttttgcaaaaagcatacctgaagcaatagctaaaatatttttataagctgaacctacttcagcaccaatttcgtcttctaataaataagttctaaaatatgaattattaaataaaggttgaacttgtttggaaatatttaaatctttatttactaagcaaactaaagtatgtgctgattttatgatttcttcagcatgtgaagggcctagtagagaaattacttcttttacgtatttatttttgctacttgcttttctgattccttgttgcaaagataaaaagctattaggataaaaacctttagaagcatttattatataaacgtttgaatttagatttaaaagaatttgttctaatacaacatctactactttagaaggcaaagcaattacaacatatgaagaattatcaagcactttttttaaatcactagaggtattaaaacaaggaattttcactgtttcaggaaaatattttgtattttttccttgacttagttgttctaattctttattatcaattccgtaaattcaaacgtttttataacctgaatcatagattacttttgcaatagcagtacccatcgctccagaacctataatactaactttttgatgtttcatatagtcaaattttaataaaaaagctttaaaaatgaagaaaaaaccaataaaaattagttttttcaaaattgtataaattattatttgctgtttgaagaccttttagtagatcccgtttatctttttgatgttgttgaatttaggaaccaatcggaagactaaccaaacaggaaatataaagaatatgttttaattattataaaatgaatatttaatgtttcctatgtgggtggtaagtgtaatattaagaacaccaacttatctgggatgcttcatttagaagcagtttttctatatttctatagtagtaacaaaaaagtaggaaatcctacttttttatctagtgttatagtaagttattaatcagctcaaacttattaactacttatcaccgtaaagataatgatataaatattttactgtatctaaatgaggaaaaagagcagctaatttttgaagtctagcattcatttttaattgctctgcagcttttagtttttcattgtccatctctttttgtgcttgggcaatatcttcatctgctttatctataccatcttgatatttctttttaattgaaggataagcgtctttacctttatttgttaaaaattctttgactttgtcatcattttctaacaaagcttcaatctctgctaatgggattttatatccatgtatgtctatgctatcgttgctccattggagtttctttaggtgcttccataggagttttttccttcattgatgtgttattattcattgatgtttctttcatcattggagtttctttaggtgtttccgttggagtttttttcttcattggagtttctttaggtgtttccatagaagtttctttagttgcttccataggagtttctttagttgcttccataggagtttctttagctatataatcttcagctactttaaacagttcgtctttttgaaattcaaaatcaggtgttttttcaataattccctctttatataaagacaataagttctgaaattgtttagcgattgttttggacatttctgccagagagtattttacttttctaaagtcatcttctgtaaggtctttttctaatctttgaatcaactttttgttttctttttgatgtttttcaataccactataaacatccattaatctattaagttgtatctgacctgctgtttgagttggctgaatagttttaactattggtaaaactgtatcagtaatttttttgttttcttctgttaatgcagtttttagctcatcagcctgttccttaatagttttggttttaggtttgttattagttgtacttccttcattagttgtactttttccttgagttggtgttccttgagtggttgtattttctgttgtaggtttattagctatatattcttcagccactttaaagagttcatctttttgaaattcaaaatcaggtgttttttcaataattccttcattatataaagctaataaggactcaaattgtgtacgagttttttcggcttttgttgcctgagatctttttatttcgttaaacttaacttctgtaaggtcatcttttaattctttaatcaactcttcgttttctttttttaattgtttaatatagccatcaaattttgctaatttaacaaaccctatctgacctgcattttttgctagttgaattttattaactattggtaaaactgtatcagtaattttcttgttttcttctgttaatactgtttttaactcatctacttgttctttattagctctggttggttgaatttgttttggtggttgagcttctgtttttgaacaacttagtgcaactattggtatcatcgccattgttggcattaatgcaagaggtaataataatttttttattttcataaattctccttttatgtatttgaataaataaataaatcttgaaatatgttttgtaaaattctaaaaaatattttgagtggcaatattttacttttttttttttttttgccaagcatttgaagcaaattttttaaatttcaataaaaatataattaaattaaagctaatctgtttacttcttttttatagatttttaaagaaaaaaataagaaaaataaacataaatttactttttttatttaattcagctaaaatttataaataaatttacaacaggaaaaatatggacaatattaaaaaatatatatcagattatttttttagaactgaagaagtaattaaaaaatacaatccagatgcaattgtagttttacaattttttcaaagaaaagaaaacacaatgcttgctggtatgaaagaagccttaaaacttttagaagatcatacagatacaagtaagtacaaaatcagatatttagaagacggaagtataattcagcctagagaagttgtgttggaattagaaggacattatcaagactttggtgtttttgaaggaatgatagatggaattttagctagatcatcttcaatagcaactaatgcacacagatgtattcaagcagctaatggaaaagaaataatttatatggcagatcgtgctgatcactatataaatcaacatattgatggactagcagctgaagtagccggaataaaaacacatagtacagaagctggagcaagaaagaacttagaagatatttttggatcaattccacatgcacttattcaatcttttgaaggagatttagtaaaagcgcttgaatgttatcatgaactatttcctgaacttgatttaattgctctggttgattttaataatgatgtaattacagattctttaaaagtattaaaacgttttggtaaaaaacttttcggagtgagagtagatacatcatcagctgtacaggataaaatgtttaaagacggagaaaaccaatttggtgttactgtagagcaaatcaaaagactaagaaaagctttagatgaacacggtggaaaacatgtaaaaattattgtttcatctggttttaatgctaaaaaaattgcagaatttgaagcacaaaatgctccagttgattcatacggtgttggagaatatatgcttgaaattaaagttcattttagcgctgatgcaacaatgattaacaacaaaaaaatagctaaatttggacgtggatatagctttaatccaaaactaaaagaatacaaaaatgataaaagataaaaatgtagttaaaaactctttgggttttgattcaaatttattcgtatatcaagataaaacaatgtttaattactcagtagatacaataatgctgggaaattttataagtttaagtaaaaaaaccaaaaacttattagaaatcggaactaataatgcagctcttgcaatttttgttgctgaacgagataaagatttgaaaatcgatgcaatagatatagagccaaaagcaatagacttagcaaaaaaaaatgtaattttgaacaaaaaagaagcacaaattaacttaattgctcaagattttaatgatttttgaaaagaacatacaaaagcacaaaaaagaaagtatgacctaatttttaccaatcctccatattacaaattaggtacaaaaaacattaaaaacaacataagtgaacaagtaaaaaaagccatatacgaaataagtattaatttggaacaaataattttaggttcttctaaaataattcaacaaaaaggtattttatctatggttttacctacagaaagatttgttgacgcaatcgagttattaagaaaatataaatttgaaccaaaaaaaattcaatttatttttgccagaatagataccaaaccttcttttgttttaattgaatcagcatttgcagcaacttgaggaacccactatttacctaatttatatttacatcctaaaaataagaaattacatgtttatcgtaaagaaataaaaaaactctataaacctataaaaaggaagtaaaatgaagaaaactttttatgtaaccactccaatttattacgcttcaggtgatttacatattgggcatttatacacgactacactagcttgagttattaaaagatataaacaattagttggttttgataccaagatgttaacaggctcagatgaacatggattaaaaattcaacaaaaagcagaacaaaataatttaaaaccacaagtttttgttgatcaagtagttaaaaaatttgaagatttatgaaataaacttgatattgattatgattattttataagaacaacttctgaaaaacataaaaaaatagtggctcaaatttttgaaaaaatgctccaaaaaggcttgatttataaaggaaaatatagtggttgatactcagtaagcgacgaggaatttttaactccaacacaagctgtagtaaaaaatggaaaatactatcatcctgtaagtgataatttattagaatattttgaacaagaaacttacttttttgatatgaaaaagtttgctccttgattacaagcttattgaaaagaaaatgataaatttgtaattaataaaaaaatccaaaacgagttagaaaaaaactttttagaaaagggattagaagatctttcagtaactagacctgatcttgaatgaggaataaaagttacatcagatccaaaacatacaatttatgtttgattagatgctttatttaattacatcagtgcacttaatttcgatttagaaaatgatcaagattatcaaaaatactgaaaaaacggggatcaaatccttcatattgtaggaaaagaaataactagatttcactgtatttattgaccaatatttttaaaatccttagatataaaattaccaacttcaattttatctcatggttgaattatcacaaatgaaggtaaaatgtccaaatctaaaggaaatgttatcgatcctattaaattactagaacaatatgataaagaagttattaaactcttttttgctagtcaaattcctgttggttccgatggtattttcgatcaagaaaatttaactttattttataattcagcacttgctaataattttggtaatttaattacaagaacaattactatgatattcaaaaacttcgctagacctgtaagatacaaaaaagaagaacttttagaagaagataaacaaatttttcaagcaataatcgaaaccaaaaataattatattaaacactttgataactatgaattagacaaagcatttaaagaagtgttttctttatcaaaaaaactaaatggttatattgatataactaagccttgatctgaaacaaataaaaatagattagaagttattttaaatactttaattaatggaatttatgcagttaatactttattatctgtatgtttaaaaaacacttcgcaaaaagttttaaagcttttaaaacttgacaaaaatgatatactcgaaattgaaaatttttctaaatttgataatttatttttagataaagctgaagttatttttgagagaatgaaataaaaagtattaaaaaaacactataaaatgaaaggaaattatgtcaaaaaacaaaaatattcaaatagaaactaacaaaacacttactaaacaagaacttggaaacaaaatttgagaagctgctaatgaaatgagaggttcattagaaattacagagtataaaaatttcttacttgaacttattttttataaaactatttcacaaagatttgaagaatgatttttaaaatataacggaagtatcgaagacattcaatgactaaacgatgattattatgaagatgaaaattcaattaaaagtccttattctaaaaatgaatatgaagaaataaaagaatctgcaaataaaaatttaggatattttatccagcatcagtatttatattcttcttgaatgaaggataatgcaagaaatttttcagcaagtttactaaatcgctcaattaactcttttgattcaaacttaagaggaaaaagtgaaaatttatttgaaaatatttttaaaacattatctgatgagttatacaaattaagtacaaacgaagcagaacaaactaaaaagttaaaaaagctaattgaaattatcaaagatattcctgttaaaaaaggacaatatgatattttaggttttgtttatgaatatttaataggtaaatttgcatcgtctgcaggaaaaaaaggaggtgaattttatactcctcacgaaatttctttattaatggcagaaatagtagcttttcacttaaaacacaaagacaatattaaaatttacgatccaacttcaggttctggttcattacttttaaatataggtgaagtttttcaaaaatttaataaaaagaaacactcagtcacctactatgcacaagaaattaatgaatctacatacaaattgacaaaaatgaatttaattttgcacggagttaatgtttctgaaattcatgcaagaaatgctgacactttaaaacaagattgaccaattgacaaaataaattcaacagaacctttaagagtagattctgtcgtttctaatcctccttattcattaaaatgagatacagaaaatgctgaatctgataaaagatttagaagctatgcagtagcgcctaaagctaaagctgactttgcttttttactacatgatttataccatattagtccagacggaattgttgctatagttttacctcatggagttttatttagaggtggaaatgaaaaaataataagagaaagattaatcgaaaacgcagaaattgattctattatcggactaccatcagatattttttatggtacttcaatttcaacaataattgttattttaaaaagaaaaactaatgacgaaaaaaatcaaatattatttgttgatgcttcaaaattgtttgtaaaagaaggaaataaaaacaaattagaaatttcgcatatcaaaaaaatagctgatactgtaaataataaaattgaattaaaagacttttcaagattagtagatgtaagtgaaataagagaaaatgactacaacttaaatatttctagatacttagataatttcaaaaaagaagaaaaatttgatttatattctactatctatggaaatgtatcagagacagaattagaagaatttaatgaattttttacaaagtttccagatattaaaaatcaattattagaacctacagaaaaacaaggttattatctatttaaagatccagaaaatattcaagaaacaatatttaattcttcttcagttcaaagttatttaacttcctatgatacattagggaaaagaatatataatctatttaaaacaaattttactaattgagatttattaaaaaaactaaataaaatcgaattagaaaaattaattattaattttgtttttaatcaattagaagaaattagctttttagataaatatgatatttttcaaattttaatgaattcatctcttgttataaataattatttagaatattttgaatttaataaattttcagacaaaacagatgaagaaattttggattttattaaatcaacagcacagataatagaaaaagaaagaatagtttctaaaaaaaccaaattaaaagaagcagtaattgttaaagaactagaatcttgagatcatgaaattattcatcctgatatgattagttcaatatttttagctgttaaattaaaacaaagacaagaatatgaagaacaaattaatcaaattgtagatgaaattgaatcaattgttgagtccataagtgatgaagataaaacagatatgtactttgattttaaagaaaaagatgatgtttgaaagattagtattcaaaaaataaaaaaagaagctaaaaaactaaaaagcgaacaaattgaagataattctctcgagtcatgaatcttacaaatagatgaattagaaaataatagaaaaaatatcaataatttaataaaagacttaaatcaagaattaattttgcaaacttataatacttttaaaacattaacaaatgaacaagttatagaaattttaatttctaattgaaccaatcctataataaatgatctaaaatctaaatctaaaaaaataatcttagattttgtttttagatttgaaaatttacacaaaaaatatgaagatgttttagaaaatataaacagtgaaataaaagaaaatgaagcaaatttagctactttattaactgaactcgatgcaaatcaatcagattctatagctataaataaacttataaaaattttgaaataaaatttataaaagagaaaatatgttatataaaccagaagaaaatgaagctaaatttgaagaaaaattaatttctttattaaaacattatggctgagaaaatagagaccttactttaaaacaaaccactaatcagtttaataattctgaattaaatgatgttttaaaaaaatattctgataatgttttaaagcgaaaagatgaacaaagtttaattgaaaattgaaaagaaataatttattttagaaatagaggagaattaaaatcaattccattatctgattcagaaatggaacaaatattagataaagttaacaaaagaaatacagttggtttaaaaaatcaatttatcataaacggtgaagtaagtattacaagagatgctggaacagcagagactaatcctgattatggtaaaacaaaatatttgaatatattttcaaaaactgatgtaaatcaaggtaaaaccatttatcaaattgcacaacaagttgtagacaaaagagcaaataagcgttttgatattgttcttttgattaacggaattcctgtaatacaaatagagttaaaaggtaaaaataattacgccatagatgcattaggtcagataaggtcatatcataaagccggtgtgtataaacaagggattttttcacttattcaaatgtttgtagcaatggatgaaaatgaaatgttttatacatctaataaaaataatgcagatgatattgtaaataaagactttatttttaagtgaactgacgaaaaaaacgaaaaaataacttattgaaaagacattgtacaaagttttttaaatattccaacatctcacaatttgattggaatatactcagcttcagatgataaggatataaaaattttaagaccatatcaatattgagccattgaagctattgctagagaatttgaaaagaataataatactatttgaaataataaaacggactttattaaaaaatgtggattaatttgacatgcaactggttcaggaaaaactttaactagttttaagactgctcaagttttaattgataaaaattatgcagataaagtagtttttttagctgatagaattgctttaactgatcagacatttcaaaattatagcgactttgcaaaaaattggagcgaagaagtaactaattctaaatacacttcttctttaaaggattttcttttaaatagtgataaaaaattacacattagttctcatcaaaaaataaacaatattgctaaagaactttctccgagtgaagtagaaaaaattaattcaaaaagaattgtttttatactagatgaatcacatagaagtgtttttggtgaaactgctgcaaatattaaaaaaacattttacaattcagtatgaatgggatttactggaactccaattttcgaaattaataaaaaaggtgagctacattcacaaattatctttgggaaaattcttcacacttatactatgaaaaatgcgattattgataataacgttctgggttatagttttaagtatgtctttttcaatgattataatttttggaaatatgcatatgagcaagatattttaagtgaattaaattatgattttgtaaaagatttttgaaatccaaatgaagctaatgagcataaaaaaaatacaaaaatagaaaaagtaaaacagatattagagtcagataaagaattttccgaagattactttagcattttgcgcttcgaaaataaaaataacgatgatattgataaaaatgaaaagttatttgaaaagtttttagagccaaattatctggataaagatgatctatgactttgaaaacatttagtagtaaaaaatattttaaaaacttgagatagttttatggctaaaaaaaatatgtttagcgctatcttagcaacaaatagaattgaagatgcaattgcatattttaaaatttttcagtcatatttaaataaagaaggtggttgtttctataagaaaattaaagtaagcgcattatttgatcctaacgaatcatatactggtgatactgaagaaatagaatttaaaagaaatggagttgaggatatattaaaaaactataatgctctttttgatactaattgaacaatagatacttttagtaattacaaaaaagatcttactataagattagctaaaaagggtccttatcaagtttcttctaacgataatgccacaaattttaataatgatggtaaagaccatttagatttagtaattgtggtgaatcaattacttactggttttgattctaaattcataaatacaattttctttgataaaaacttagaagaagagcacttaattcaagcgatttcaagaactaatagagtatttttaaacaatataaaacctcatggtaatgttgtgttctttaataatccatttaaaatgtacaaaaacttaattcaagctcttaatatttatggaaacattaaatatgcagatgtttccattgtagattttgataaagataaaatattttgagtggtagaccaaataaacgaaaactttaatgcaatcaaaaaattgttttatttatgagatattccttgttttgaaagtattccaagcgatgaagaacaagataataaaattcttattaaaagtcaattagaacagtttttattatgctgaataaaaatttactatttcacattacaactaagaaatttagtagatactaaagaagaacaagattttgtaaatgaaaatgtgcagattacagaaaaagaaagaaaggcacttgaagttttagttagagaagcaaaaagaagatttaaatcaataaaagctgataaatttgagtctccaattatgggagaagaaagattaattaatgattatatttcttcttttggtaaagatattatcaataaggataatattcatcaatttgcttattcaacagaaaaaattaaaagattaataaagcaagataatacatatgaactagaagaagaaattaaaaaaataatttttgaaattaaagatgatgagcaaagagaatgagcagagcacaacatagataaagtaactgattttcttacctcacaacccaatgaaatttcattagaaaattttttagaacaagaagttattaaacaaaatgaatataattttaaaaattgatgtgaaattattggtttttctcaatatttttgaatcagagaattacttaataaacccaaagatgaaatttttaattttggtaaaaacgaagaaatacgaagcatatgagattgtggcaaatataaacaatatttaaaagaattaaataaagaaaatgttccaacaggttgcatagccttatacaaaaattttcaaggagaacttgaagattgatcagataaattaagtaggaaaaaagattaaataaaaaccagttaaaactggtttttatttaatcaatttctactttaactttaccttcttttcttcatttttcaagcaaattcattcattgttcttcgttttcacatagtaaatattctaaaatttcagcatcttttatagaattaaattttggagaaacaccagaagatgtatgttctaaatatcaagttttaatttgcgctatatcatcttcaacttcttctttgttaacattaaaagaatatgtttgtatttttcttttttcaataggaaagtttttaggatctatataatcttgttcttttaaaaatgttgctacaatagcaaatctatctaccttttttaagtaagcgtacaactgagcttgttttaagtattttggaggtaaattttctccgtttttacctcatttttcaaagtttttttcgcccgttgtcttaatttcgattataagttgtttttcttgaataaatccatcaggaataccgccaattatcggatcttctttaaaataatcatagttatatttttgtggtggaaacacttcaacttttacttttaattttttctcaatcgcagctactactaaaggctcaatcgctaccccggcatcaatatatttggtatctaaaataggcatatctaattttgataatctaataaaagctttaaaagctgaagaataatcatcaacttctaaaacctctccgattgaagaaccacctatttttttaaatcctgtattaaaagcaaattctttgtttaatagcttttgatgaaattctttttcaagaatcacttcttttttttctaaatccacaaagtattcttttttattataaaacttccttgtcatatctttattatattaaaattccttttaaaatctaaaattgaataaaataaaaactttttctttagtttgtttactttttttatgctaatcaaggttcaaaaactataaatgaacacaccagtcctgttaagaaaataaagaaaataggtactttttttctgtacataataaatgaagctaatgtataaacagggacgaaaactagtaagacataatatcttcaatttgcaaaaaaagtgttttttaacgaagctacatcactatatcctgcatattgacccattgatttattaaaataaatttgaataaaataaatactaatgaataattgaattgctaaactaatcataatagccgcgattgctggcttaaataaagaaaacaattttttaaatctaggattatttttatgtttttttaaaacttttaaacctaaaataactaataaaattgctggtaaactaaaaacaaagtaaaaaaatattgataaaaatattcctcatcattgattattagctacaactaatccagtaactgctgcaaattttaatgaaacaactcctggtgtagaatttgtaatagaaaaaatttcttgtattctgttttcatctatttgagttccaaactgattagctagaaatagtcaaaatcagttaaaaaccggcataaaaacttgtccgccaccaaaaactattaagcaaataattatcagtaaaaaaatactagttattattactaaaatcatcttttttctttcttatttttttataaacaaactcaaataatacataaagtataaaaataattactaatgaaataacaggtaaattaaacggtgcaggaacaaaaatacaaaataaaaatgtaaaagtaaaaattaaaattaccaatgctagtgataactcttttttacttgtttttatatagttaactccaaacgcaattaatatcccaataatagcaggcattattcctatatttataaccaataagtatttaggcggtaagtaagttgaagcataaatcaaaaccaaagcaaataacatatgtggaagtaaagcaagtgtagttgctaatattcctttaaatttgccgagcattttaatagaaacaaaagaaaacatttgtattacactaggtcctggcaataagttggtcataataactacttcatcaaattcagcagaagttagtcaattatatttatcaacagaatatcttttagctatgggcataattgcattacctccaccaaaactaataaaagatatttttaaaataaatcaaaagacttttcaaaataaattaactttcatattttctttctttttatattataaatgataaagaaaaacttatgaatttttaaaaatcaagtataattttatttggctatagaggtgtagttcaatggtagaacaacgggcttcaaccccgtgtgttgcgggttcgactcctgtcacctctgccatttttttattatctttttttataattttgacttgaaaattcatagagtaaaatggcattggcatttgctatgtttaatgactcaaaaacaattggaatataaatttgttttttaatttgtttttctaatttatcagaaatccctgttgattcattaccaaaaacaattgcatatttttgattattatcaatcaaaaaatcctttatttttgtagctttttttgataaaaaagttcccactgatataaagttattattatgtaatttttcaataatattctctagatcttctactcttaaaatagaagttttaaaaattgctccttttgaggaactaattacttttggattataaaaatctactcctgaataaattaaagaaaaatcaaaagcagaacaatttctaataattgttcctaaattccctggatcttgtatattttctaaaatagcaattcttttgtgtataaaaaaatcttcaagttttaatatatctaattttttacataaagccacaacttcagaagcactttgatatgaactaattttttgcattatttgttcagaaactaaaataatgtcttcatttttgaaggatttaagttcaaaattaggattagttgtataaatttttattactttgttgtactcaagagcaagctctaaatccttataattttctattaaaaaactattgtgaatttgttgatatttttttaattttaatttaattaataatttaatttctggattttgtaatgaactaattatcttcatttagaaagtattttcctttttgcacttcatataaagaaagtgattcaaaattaagttgtcttaaaacttcataaataacaataacaactgaatttgctaaatttaaagatcttgattttggttgcattgggattctaagacatctgtttaagtttttagacaaaatggatttaggaatgcctgtagattctgttccaaacattaaaaaaatgtcttcatttttgtttcttatttttttataatctacatctgaataagtttgagttgcatatcttgtgatgtaaaaaatttctttatcttggtatttttttacaaactcttcatagttactgtgaatttcatgttgaatgtcagaaagtaatttgccagcagcaggtctttttaaatattttggttctaattcaaaagcaataggttttataatatgtaattttgcatttgttgcaaaacaacttcttatgatatttccggtatttggactaatttcaggttgatataaaacaacatgtatcattttagttttctatctccaaacgtacaaaatattgccctacaagctcgtttttcaaagtgtgtaaagtatagtgaatatctacttggttttcttcttcagaaagaagttgtagtgatgattctaaaaacatttgaccatgaggagtgttgtattctatagtttgttttttgtttttatccaacaaaattgttgacatttcagttattaataaagctttatttttgtatatttctattcttaaaatacctttattttcaggatttgtaaaagtatagcttgtaaattcttcttgagtatcaaagctgatttctttttctctttcgagtttagagctaaaagataatttttggtcttcaattccaggactttttattgtagatgaaaattttataatcattttgctaacctttttaaaattaagtcttttcctaataatcaaatcactttagctaattcaggccctgatgatttaaaagtagttgctattctaataggtaaaagaagctttttaccatttaaattagtagcttgttttgttttttcaatcgcttgttctagcattacaacactaaaatcatttcaatctaaaaatgaagtaaaagtctttagtaaattatcatcaatttggctataaatttgtttatctttttcattttgacattcttctaaaattgtgctaaaagagtttatttctatttctaaatctttaaaagtagcacaactagctttgtatgtatcaatcgcaaaatctaatcaattttgtaaaggattttgaagggttattttaatattttcctttatttgatcattagttaattgtttaaagtattgtttagaaaatcattcaagttttttattatcaaattttgaaggagatttcgaaagtctttggggtaaaaatgctgtgattagttcttcttttgtcattagttctttagcatcttgagaagttcaacctagtaaagctaaaaaattaaagatagcttgtggtaaataaccttcatttttatagtcttctatgaattgaaataagcttttatctctttttgaaagttttttaccgctttgatctgtaataatagtaaggtgaccaaaatttggaaaatctcaatcaaaagcatcataaactgctaattgttttggagtatttgaaatatgttcttcacctcttaaaacgtgagtaatttccatatcgtgatcgtcaactactactgcaaaattataagttggataaccatcagattttattataactcaatccccaatatcgtttgaatttactttaataggaccacgaacaatgtcgtttcaagcatattctttgtttttttctaaagctagtcttattgaaaattgtttgtttttgaacctttttattttttcttgttgagaaatcttcaaccagtttctatcgtatctaaaactaaaaataccttgtttttcttgttcttgcttttgttgttgcaactcttcaggtgaatcaaaagctaaatatgcctttttttgttctattagtttatgtgctaaatctcaatatctttttaatttttctgactggcgataaaatccatattttggattttcctttgtaggatattcatcaggaatgattccaagccaaaaaagattatctaactgagatttttcaccaccagctacatttcttgcaacatctgtatcttcaattcttagtataaaatcaccttcaaaatgctttgcaaataaatagttaaacaaagcagttctagctcctccgatgtgtaaataaccagtaggactaggtgcatatcttgttcttatttttgaatttgctaaatcgattatttttgacattttactcactttcataaactgcaattctgactttgttatttatatcataaattattttaaattcaggatgatattttttaaaaaattttaaattagtttggtcaatttcaaataaaattacaccttttttatttaaatatagtttatattgttttaatatttttttaaaaaaataattgcctttttgctttgcaaataaagcatttcaaggttcataatctaacactgaagaatctaaatttgaactttcaaaatctaaataaggtggattagaaataataacatcaaacttataatttttcaaattttcaaaaagatctgatttaatgattttaacttttaaattatttaattttgcatttattttagtttgtaaaattgcttgagaatcaatatctgataaaatcacttctttggcttgtgtatttttagctatagaaagtcctataaatcctgaaccacaacctaaatctaaaactgatgaatttttatttataaatttgtaggcttgtaaaattaattcctctgtttcataacgaggaattaaaacttttttgttgatgtttattgttagattttgcatcataacaaagccaattattttttgaatcggtatgttagtttttagtaatttttcttcttttttgttgatgtttagctctaaattgtttctttgtttttcttttaacaaagctaattttcttgctaaaaaataatcattatttgttttcatagctagttgctattctttcagctttatcttctgctaataaagcctcaatgataggatctaaatttcctacaataacattttttaatgaggtagaaaagctaattctgtgatcggtaacacgatcttgagggtaattataggttctaattttttctgaacgagcacctgaacctgctaatttcctaaattgaccttcgattgcttgttttttttcaacttctagattataaattttagattttaaaatttttaaagctaattctttgttggctatctgagatcttccatcttgtgatgtagaaactaaaccagtcgggatatgagtaattctaactgcagaatcagtagtatttaccgattgaccgccagctcctgaagaacgataagtatcaattcttaaatcttgtggttttatgtctatttgaatatcatcgtcaacttcaggcattattgtaactgtagtagtggaagtatgaactctgccttgtgtttcagtttcaggtattctttgaactctgtgaacacctgattcgaatttgagcttggaatagactttatcaccgctaactgaaaaaactatttggctaaatcctccagcagaagctattgatgagtttaaaactttaacagatcatttttttgattctgctcattttaaatacattttataaagatcaccaacgaaaatattagcttcatcacctcctgcagcgccacgtatttctactattacatttttatcatcattttcatcttttggaagtagtaaaataactaattctttttcaatttcttcaatttttttagttgctatagcaatttcttctttagctaaattattaatttctacatctttttcttgtagtaattttttagaatcttcaattatggaaatttgttttaagtattcgttaaaagcaacaacaatatcttctatagaagctaattctttgttgatttttgtatattcttttatgtcagaaacaatatttggatctagtaatttattagataaatcctcatatttttgtttgattgaagttaatgaatttaacatacttttttccataatttttagtcctttgtattgttttatttttgttattttactttaaaaatgaagaaaaatatttttttattctattttgtctctttagcttttaattttacaaattcttcaaaactaactcctttttgctcaataatatttgcttgtttattttcgagtttaataattctatcagccaaaggaagcattgaaacatcgtgagaaaccataactattgtagttttgtatttttcattaatatattttaaaacttttaaaacaattgctgtatttttttcatctagcgcaccagttggttcgtcggcgaaaataatttcaccatttttagctaaagctcttaaaattgaaattctttgttgttgtccacctgacatttgagaaggatacttgaatttaatttcatcaacctcaaattctttaaatagctcatcaatgttgatttttttatctttatctttttgcaaatgtgaaccaacttgaacattatcaaaaccattgatgctttgaagtaagttatagttttgaaaaataaaagaaacattatctcttctaaattgagtaagttgagcgttagttaaaaaagatagattttcatttgctacaacgatatctccgcctgatgctcgatcaagtccagacattaaatttaaaattgtagattttccagaacctgattttccgtataaaattacaaaatctccttttttaatactaaagctaatgtctttaaatacttcagctacaactgaaccaaataaataatattttgaaactttaaaaaattcaatgatattaccttcagtatttgtagtaatttttttgcttgattttggtaatgggtgattatttgctcaacgaactaattttagttgttttttgttaagttgaaaatcagaatttaaattctctgaaataatttcatttactttttcagatttatttgctttagtaaattttttaaaaaaattagtcattagttctttaaaaatacttgttttcatattttcctttagtatctaaaagcttcatttttatagcattttagttaatttttattttttagctatttattaaagatatttttttattgtagtcatacttaattaatgtaattattcttcttttaaaatataaactgattttttacgatttagtaatcatcaagaaaaggcaagtgtaattgcaaatactaataaaataattgcaagagtaataaataaattaagagctgaaacactaattgctaaaacaattgaacttgtagagattatgtaattattaaataaactaataaatgcataaaccagtgggattgagattgcaaatcctattaagacaattggtaagtaaacagtgaaaaatagtttgattttttgtgccgttgaatatcctagaactgataaaattgcaatatttttttcattttcagcaataatagttgaagccataactattaatataataatagatactatcaagaaaatcacaacaaccattgaagtcgcagaactaaataataaagcaaagttattaataaagttagtttcaatatcttttgcagaaattgcttgagtttctatttgatataaattatcactaaataaactattaaagtttttaagagcatttctgatgactatgttgtatttatcaaagtattcttcattttctagttgtttgaaatttaaagtgatttttggttctaaattattatcacttgtttgattttgataaattagttcatagagcttatcttgtgtcaatccttgtttttgaagtaaaccttgttttgaatttggattattttgagaatctgagtaagcaaatatttctctaaagaatctagctgctatttcatttgaaattccatttacatcaattgaatctgtacctgctcaataacctgaaggagaatataaaccaattgaagctcttatttgttcaggttcattatttgtagacattattccgttaaaagctttatgtccaaaggtttttagaattggatcgaattgatccatatttgttaatttattaactacatcacgtgttgaaattaattctgagttaataaatgtattggaaatagctacaatttggaatttagctgttttagtaggtatatgatttagtttatcttgataacgagttattgtattaaaaataggtaattcaattattgaatttagttttaaattatgtttttgtaaaaatactcagttagcagctaaaggataaatgtttttatctttattatttttgctaaattcttcaagaattggaagtacttcttgtgatttgttatttactatttttataaatttagaatctgtatcatatccaaatatttttaatccagattctgatttaaattcagtgtcaatgtaagaaaatagttcgtcttttgctggattaaataaaattcctccgaatgaaacactaaagtctctgtttatttttttataaccatttactaaaaatttacggtatgcatcacgagttttagtttttaaacttacttcttgagaatcataagcttgcttgtctttgttatagctaaagtatcaaaaacgagaagttttagggctatcaggatcttctacaaatttaaaatatggctcgtaatttggagcttctcctttgtaagtaaaatctactccatttctattttcggtttttaaatcttgtgttttttcaagcaaggcaaaagctgcatctgaaactttaagaatgttattttttaatgattcaggaagattatttactactacgtcaaaaatagttccattatcattttcttttccttttacatttaaagaagcacgagtaagaacttgaggagcaaaaggaatactttccccgttggctttgtttactcctttaataagggcatgacctggttggaaatattttggatcttctaagtcaacttctccttcaaatccttcaggaacatataattgattgtctaattttgctagttcataaggaacaatcggtccaccttcttttgatggagtaaataagttaattttgaaattatatagtctattttttcaagtattatttacagaattttggaagatatttcttgatgataaagaaaaaattaaaacaaaagaaactaaaactacagaaattgtaagcgaaaatagttttcaaaatgaatttataactaaagaaaatgaaaacttagttgtaatatttttgtttcttaatttcttagataagaaaatagcaaattttgaagtatttaactcagtaattcctgatagaagttgatttggtttacgcctgaggattcaaactactgaaagataaatagtcaaagtaagtaaaacaaaaggaacacatagagaaatgaagaaagaagaagattcaaagaatgaaaaatctgtattaaattctcaaaattgttgtagtaaatttaacatcggtcctcttagagcgacacctaagagatatcctaaaaacccaccaatgatcgaagttgctatagaaatcgaagtaaacgaagtagcaatttcgaataacgagtatccctgtgctcttagaattcctaaaactttgtgattattattaacatatctttttactatgaaaaccacagcaaataaaactaaaatagaaaggaaaattgttaaatataaattaatatttgctaaattatttacaaaagataaagctgtagataatctcagtgatctttctggatttagaaaatcaaagtcattaattgaataagttttttcaatatcagtttgtgaaaaattagaagataaaaatctgttagtatcttgtttgaaagcttctatattagtttgaggatctaacttaactaataaagatttttttactaatgtagaacgattagattcacgaactttatcaaaaccgtatttatttacataaacaagagcttgattttgtgaatcaatttgtaagttattttcatctagtaaaggatataagtaatcacctgttgaatcagttcctacgataataaattgaagaccgttaacatccaaaatgtatttttgatcgatgcttttaattagttgttcaatttttgcagtagaggtaggaagttctttgtcataaactgctttgtgatttgcatctaagtatgtttgatttactttagcaacaaaagaacgattatcgtatgctacaacaatatttacatattctctaataacaaaaacattgcttactaatctgtcaaaaaagttttttaaatttagatcaaaaaagattattggtctttgattatcatttacaaaaactctgttagaaattcagttaatatatgaaaaatctaaagaaaaactacttacatgtgaggcatttaaatctactattggttttgattctgcttgattaattccttgaggtttagaaaacatctgacttactttagatatatagtcgtttggatatttttctttaaaaaagaagtattttggtaaagaatttctaaaaactcaagctaagttagcatttacttttttagcttcagagttaatttgaggatttacattttctgtattagttgcaaatcataatgaagcttgtggaattctagatctaaaataaggacttaaaaataaaagttttaaatttaaaccttgtaaatattgatctaaagaagaggaagtagtttgatagtaaattttgtttaaaacttgtttatcaaaataatttaatttattgtcttttaataaaatgttatttactacataatcaacatttttatagtgtgattttaatagtaaagattcggatttagaataacctataagggctaaattttctatgaatccaaatttgttattgataattcattgtgctaaagaattgtgtaatttatcttcttttttgaataaatcactatctaataaagaagctaagtctttggaaacaaaaccatttttatcttgtttaaagagttcaaaactaacattaaaaggctgtagaattccttttcaaagaggattcatagatccaataattaatcctctagttgatacatttgaaacacctgcatctaatgttgttgaagaaattgaagagtctttataaataaagctatttttatctattgctagattatataaaatactaaatgcttgttttagttcttcattgctaagttgtggattttcagtgattagtttaattcaaaaaccgaaatttgtaagcccctctgatactaatgaatctggattttcttcaaatggtttgagtatagaatcttttagtgattgtttataaacattagaaacaaataaatactgtctagattcaagttcattaaatttttttggtctaaaattttctacagaatcaattgaagaagctgtatcataaacaacatctgctattgaatttaagtattttagatactgaccaacatcattttgtgaatattttatttttgcattttgatcttttaaactatcttgataaatttttcaagtaattaaaggattgttttttttgctaatgttttctaatttgttatcatcattttttgtatatgaagaaatttcaagtaatgaatatattttagaaaaactttttagtcttaaataaacattaattaagtttttattatctaggactttaatatctaaatactctactaaaaactgttttaatgctggtgttaaagctaataaatccacatcaaaaggcttttgatttaaagtaaattgatttgcatctagttcaaaattattatttaaatcttgtttttgtaattcattatttagtttattaatatctagaatatcttctattttatttatcaaaatattagctatagattttatatcagctctgaaatttgtattagctgtagaatttgaattagttgcggaatttgcatccgcaggtgcgctagtatcagcttgagtaagagcttgcacatcgtttatagttatttttttatcatcatttcctggtgcgtttatttcataagtaatttctgttgcacctgaaagattaaatgcttttattaatatttcaattaattgactttgtgcttgtttatctttggctaaagtaaagacaaaagaagcaattacatctgaaagttttaaagaatctgatttaaaatgcttagtttctatttttttagtttcatctgaataaagatctaaatcagttttatatgaataagttgttttttctaaatttttgttaaattcttttaaatcaaaaaaattaaaaaatgaaactaaaccttgagttatgtttgaataaggagcaaaacctacttctgcaccatttagttttctaaaaagagtcaatactgatggttttaatttatctgagaagttattgattattttattaactaaaagccctttatataaaccagtttcggtatctatttcagttgaaaatacagcttcgaagttaatttgagcaactatttgatttaatcctttttttagaaattcagtatctactgattttaaaatcggatttataatgttagctattccaacacttttataaaatccatcagaatctagtttgttagaattttcttcatatcatttgtgaatatttttaaatgctgtgtttaaatcaaaagaataaattattgtctttaaaccttttagtatctcaactggatctttaattagtaactctaattgttttggtcttactgaatcgagaaaatttgaaaaagaagttactcctaaacgttgaaagacaggttttagattataaatttgttcaattacatattgacttcttttttgttgcggttgagcttctacaatgtcaataaatttatcaataattgaaccaaaaaagtcatttattattgttggtctaattttagttactgcgttatataaagagtaaactataaatttagaaaataaatcaggatttgaattgtttcctaaaaataatttaaataaatcgctttgttcaaaaccagtaataaaagaatcaatgagtgaatctacatcagatttaactaaaaagtctttttcgattagttgtgatgtagaaaacacgtcttttaattgattaaataaaatacttgctgttctagttgcttgcaattcgtttaatactgcagaagaaggagcatagaaaattaatggaacattatatgtattcgaaaatcttggagatacttttagtcaaccatttggtcctattttgccttttagtgtaagattgttttcttctagatatttactaaattttaataaagaatcaaaagttaaatctggattaaaaattcaagtgctttcgttttttaatttagttactacaccaaaaacatttgcaccgagaataattgttccatattctttgtctgggtcttcattttgaagagttttttgtaatttaactatcttaacttgagttttaatgtcgtctactaaagacttatttaaaaacttaatagtttcgaaagttgtatcaacatcaatgtaatttttatctactgcactttgctggaaaatagcagaaattattgacgctacataaaaaggttcgataattgaatttggatttagaagttcgtcttttggagtaaacaaatgagaaacttgtttttgttcaatttttttatactcgtcaaataatcttcctacttcttgtttttgtttttcttgtttttgattaagagaaaatgtatctggagcaattcctgcattaataaattgtgcaacttgattcttttgctttttagttactggatctgttactgaaaaaggagttgttagatattctctttgacctattccttttactacatttttatcttgattttctatgttttgtttgtattcttttagatgttcaagaattaagtctttagaaaagttttctacatttgattttatgtttaaaaaagtagtatctcttacattaggatttgaaagactagcaattctttgttcagttaaaagtcttatattattttcattacccaagttttcaatttcagctatagaagttggttttgcacttcctttttgaagcaaaattgttaaatcttgaggtattaacttagacttaaattcataactttttccatttatagtcgttgttgttactttttctcaataatttaaattttctatctttttaaattcaacaggttgtgtttttaattcttgtaaatattttaaaaaagctcctgaaaaattattttcatttacttcttttagttttcatttatggttaatgtaagatacatcgatttttgttgtatcaaatcattcgttttttaaattaaaatctgttctttttggaaaaacaaaataatcgtaagaataaacagaaacatcattataagaatctaaaataatgtttgcgtctttgtttatttttaattgatcgttgtaagcaatgtaattaaaaggttgtgaataattactaattgaaaaagttttattttgtgctaattcatttatatctaatatgtttttgcttgattttgaagcaaaatcagggataatctgattattttttttctttaaagataagaattttaatacttgattttgtggcacttcataagctatatttagtttttttcattctaaaattttagctgtatcaaaactagcttcttttgttattaaatttaaatataaacctgaaatacttaaaatactttgcttgggattagcattttgatcaaataaaataatttcgttaataacataatcacgatcaagtttaaaaatctgattttgatcagttacagtatatgtttttctttgtggttcaaaaccatcttttgtttgtgaatattttataaaatactcattgttatcttttagattagaaactctaaaagtctttttattgctatctatattaaagaaaaaatttgttgcaaaatcaggattattttgaaacaatttatattcttgcaataatcttgctgatgaaatataggaattagagtcttttttattagttccaattaaatcagctaattttatatatttttctccaataacaaacttgtgagtttctattgcaggtgaattatatattttataaacatcatcttgttcagcgtcaaagccgttatcttttgcattaccaaaaaaattaagatccaaatctacggttgcatcttgaattcctgaaacttgtctgtagtcatttattttattttggtatgatttattaattgtaaaaagtaaagtaaaaattcctgtggttaaaaaaaccaagattgaaataccaattaaaataactttatttttagacaatgaatttcaaatatgtttaaaaattttcttcataattcatctccatttatcgttgtgcttgataaattaattttaaaattatataacaaaattaaaattaggctattttttaaatgctttttaattgaattaactatgtagttttgtaaaaaaactgtaaagtaataaataaaattaactaaaatatttttataattaatttttgtgccataattaaaacataaactaaaaaggagacatgtttaattatgaaaattttattaatagaaactgcattgacagaaaattctactaccaaattaatgtcacatagatttattgaattttataaagaaaaacaccctgatgttgaagttatagaatgagatattaataaaaccgaaattggtaaaatttcattaaattctgaaaactttgctacattttgaaaagatgtagaagcagataaatatattgaagagctaaaaacagttgataaaattgtatttggtgctccaattataaatgttcactattctgcaaacgctaaaaacttttttgacgctatttgtttagcagataaaacattttcttacaaatattctaaaaaaggtgatgcaataggtttacttgataacattaaaaatgttcaaattctaacatcacaaggtttttctaaaaaagtaaaaatactaaataaaatgcaagatacaattgctggaacttgaaaattcttaggtgcaaaacatgttcaaccaacagttactgtatattcagcaccaggttttgcaagtaaagaagaagcagtaaaatcagttgaagaagaactaaaaaaagctgcacaaacattttaaaataaaggagaaatgctatgaaaattttagttattaaagcatctgtaaacgaaaaaaaaggttcttattcttctgcacttaatgataaatttattgaattttataaagaaaaacatccacatgatacatttcaattttttgatttaaacaaagaaaaagtgggtcttactcctttaacaggagaaagtttaaaagatttcaaattctgacaagaagttgaatcagataaatgaattgatttacttaaatgagcagataaagttgtattttcaacatctatgacaaactttcactattcagcacctgcaaaaaactttattgatgcaatttcagtaagtagaaaaacatttttatatgataaagaaacagattcatatacaggtttactttctaatgtaaaaaatgttcaatttttactagctcaaggagcacctaaagattgatatccatgaggaaatcttgctaattcattaagagaaacatttttatttttaggaatgcatatacataacaaacctattgttttagcaggtacaaaagtagctccaaataatcaattaagtattgatgaatacctaagacaatacgaagaagaaatcaaagaagctgctgataaattttaataaaattattcttaaaaaaccttcatttatgaaggttttttaattttttctagtcttaaaattatgcataaaagtttataaatagaagtaaagcttttgcatcttgttattcacttgctttttttagataatttgatcatttaacattcaaggaagtaaaaatgaagaaaaaagaaggttccagagatattgactagcgaagcttaagacctataattattaaaagaagaatgagtctaaaaatatttttatctttctaaatcacttaatgaaacattttctaaaatagggttttataaaatatttatactcttagagtctgatttaattactttaaaatgtagattgtctttgaaggaattttaaacgcaaaaaagattgcgagaatattcataaaaagatgtagcaacgatattagattgaattattagtactatattaaacaaaattagaaacaaagatgaacaggaagaagtaatatcgattctaaacaaatttaaatgtttaagtttactaaaatataataattaatttgtttttttataaaaatatattaaaatttaatgactaattaatttttaaaaatataaaaagcattctttttatgtgaaaggtattatgaaaaaagatatacatccaaaaacaaacgaattaaaaatttcttgttctacatgtaatacagaatacacatttagaacaactgttgaaaaattttcagttgatgtttgttcaagttgtcatccattctttaccggggatcgttcattagtaagagcaactggtagagtagatcaatttaaccgtagattgaataaatctaaagaattacaaagaaaataatttattaatcatttaaaaaaagcaccttctggtgctttttttaaatgattaatttgaagcaagaattttaattactgtttcgattaattctttagtaggcatagttttatagctggaaatttctaatttatctgctaatttatataaatcttcaattgataaattttctactttttttctagcttcttgttctttatcagtttctgaatttggtcttgaattattatttttatcattagtattttgttgtggatttacaaatggattgttaaaattattgttttgattattagctttattaaaagcatcaaatatgttgttaaatgcatttggattgtcttgcatttgttttatttgttgctggaatagttcattattaaatgataatataaattctcttctaatggcatttactttataaaatagaaatctatatgaaataagtgtacaaattgaagtaattattaaaaacacaaaataaactgacatttcagtggtgttttcaacaaataaattttgattaccttgaggtaaaatgataactattctaagaaaagaaataagtaaaagaatatctgatattataattcacaaactagtatttgcaccaagtcttacaaaactttttgttttaaaactttgaattatcgatacaacgaagtagactaaagctataaatataaaaaataaagaaaatattggaaatagcattaaatcagtggaaggttctgatttgcctgtttctttattaggttgtgaataaaacacaaatctattgttaagttgcgcggctgaaattaaactaactaaaatgatgtttaacacaaacaaaaaaactattgaagctaaacaataatagactcattttttatagttgttggatttagtttctcatagttcttttacagttggtaaattttcttgtgtaaatggtgaattaaaatttatcattacttccttaattattttttgattttgaaatgaatttataatacttggcatattatactataaaatgccaatttacttcagaaaataaaaaaatggtggagatgccgggagttgaacccgggtccacgcataattaaatataaattactacagtttagttattttttaaaaaactttttaactaaaataacaaaaagataaaaagcctgtgatctataaattcattaaaaaatgatcagttttttaactattctctaatatgaagattgcaacctatgagaagtaagttggtctactaacttttaaaaagcaaaagctagatttgattgagtagaagcattcattaataatgaataatcttcttttttgttttcttttccgtttagtaaagaagttgtattaaggtttacaagaccactgcaatttatacccttttatgtatgtcgaagccagtacacccccacttgtgtggtaattaattataacatttttttattgaattacaaaaaaattaataacccattttttttatcaattttgtatcttttagtcagttttgagactctttgactttattttttaaaataactttttgacctaatttgtcttctaattctaatctagaggctttaccaattttttctagcatagctccattttttccgataactattggaatatgtgattttttagctacataaattgttgaagtaatataaatttgttctttttcttcatagttttctataaaatcattaattacaattgcaacttgatgcggaatttcttctttaatatttaaaagtaggtgttttcttataatttcttttgctaaaaaacgcataggtctatctgttaaaaactcagtatcaaaataattttcactttcatacaaatactttttaatttcttcaagtaaatcttgtttgcttacttgatatttttctgaaaaaccaagaactaaatcaaatcctagttgcttgagttcttgtgctttttgagcaagaatttcattattatcttctaaatctatttttgttaatatagctattttgttctttgtttttaagacttttttagctaattcagtagttgtagaatctatttttctgttaacaggatgcaaaaacaaaactaaatcaatatcatcaagagaagaaattgaatttttgtttaaaacctttgaaaataaagaattattattttgaaaacctggcgtatcaacaaagactatttgaaaatcttcttctgaatagatgccattaatttgatctcgagttgtttgtggcttataactaacaattgataaatcataatctaaaatgttgtttaacatagtagacttcccgctattaggaagtccaataatagatacaaaacatgttttcattaatctaaaaactcttttctaaatgctagtggtaaaaaatcagttagtcttcttttttgtacatttccgttgtttaaatacaagtaaacctctgcgttataatccatcaactcgatcatgacttgcaagcaagaaccacaaggttttataaattcttctgtattagctaaaatgtgaatttctttaatttctccaggaacaaaaccgtatgttattgaagaaaacaaagcatttctttctgcgcacaaacctgaaggataagctgcattttctacatttacaccttgtcaggtgtttcctaacttatcttttataatagcagcaactggaaattttgaatatggtgtataagttttttttagtaatttttgtaattctgtaagcataatttatctttctatttgaagtaatttcattattttatccactttttggttcattatattttcttcttctttagtcatatgatcaaaacctaacaagtgataaataccatgagtaaataagtagcaaaattctcttgtgattgaatgtctatattctttagcttgttgctggactttttgataggaaattaatatttcacctaagaatttttgcttcaaaaatgaagtagaaaaactatttgtaaaaggaaatgatagtatgtctgttgttttatcttttcctttatattctaaataatattgcctcatctgtacatcatctattaatgttaaatctaatgttaatggctttttaaatttttcttctttttctacagtgtttaatattaattcgaatgtctttaaatatctaaatttatatttagttgtatttaaaaaatttatttgagttttcatattttaaaaaattataacaaaaacaaatctaagaaaatagatatgcaaaactatttagttgttttagaactaaaatagcattgtaatttgtcttaggttgtaaaaactttaattttgaattaaaagataaaactacattaaaaacatcatcagaaatgtgctgaatattctttatttttaaagcaaaatcttgttttttataagtcaaaagtacatatgagtcttttttgattttataaaataaatctgaatttatattaaaagatatttttttatgatcatcaatttcaactttaattggtattttgtcattaagttttacaaaataaaaaaaataaacaagaattagtatggaaataaaaaacaacactaacaaaaataatcaatacaccttgctaaatctatatattttcaacattaacaaccttagaatctgaaaataaatatttttttgaatgtgagacttctatgaaaattgctttattttgaaactcttttattattttttttaaaatttgaaagttttgttcagaaatattttcaaatgtttcatcaagtaaaattaagtcgaattgtttagttaatagttgtaagcaattgataatttgtttttgtccacttgaaaagttttttgcattatttattaaaatatcatctaattttatatctcatttttctaataaaggaagtaaattaaaattttgaatattttctaaaaaagtttttactttttctttttcaccataagtaatatacgaaaatacatctgtttttggaaagtaattttcgttttttaaataaatgattcgttgtcttaaaaactctttgttataaaacgctaaatctaaatcatttactaaaaaatttccactatattcttgatcaaggtttaaaatttttaataatgttgattttccaacaccattttttccagttaaaattaaattattatttatttctaaatttttgacactaaatagctttttatttactatcaaatcacaattaattttttttagctttatgccttttatttcttgagtgtagtctccatatttttctttttctacatttaaaataaaattaattgcttcaatttcttttgatattgcaggataaacagctaacatttcagaaatagagtttaaaggattgatgaagaagctaaaaaaagaaataaaaattaacaaagttcctagagataacgaatcatcaataattcaaaacgaagtaatatacactaaaaaaataggtgtaattacaagaaaaaaattttgtaattgacttaggctaaattgtaattgtcaaatggaaaattctttgtttttaaagctaaaataagaattatcaaatttattttttaacattttatatagatcattgttttttaaattatttaaagaaaatacaaagtcatttatagaatttatagactctatattagtttcgtataaaagtggtactttttttgaaattattttcttgaaaaagtatgaaataactaaaaataatatactcactgctaaaatcattaaaaatagttgtcaactaattcacaataaaataaaaaatgacaacaaaaaagtaactaactcattgaatatattaaagtaaaagtgtgaagaaaaagaagcaaaagtgggtataaaattaatcctttttaaataatctgctgtctctagtttataaatttgtttattaacacctttatttaatgcaattaagaatttgtcaaataaaaacctttctttttgtatttgaagtttttttatataaatttgtttgataatatcttgaatgaattttcatataaaaattcacacaaagaataaaactattttgtgaagtaaatctatctgtttataaggaagtattttatctacaatagtttttagataaaaaatagataaaaaatttaatattgcagaaacaaaaataataaacaaaattactcaattatttttattatttaaaaagtaaaacaaactatttcaccattctttgtcttgatttacgaaggaaaaagaaggatttttagagacagaaacaacaatattcagaaattttttttcaaattcttgttttgttaattttatctttccttttataggatcttgaataaagaaaatatcatttttaattttttcaagcactacataatgattaaaactttcattttgcaacaaaattacaataggtgacctaaactttaattccattaaagttgttaaatcgcagtgaaatgaatcaagaataagtccaaaatgtgttcctaaattctcaagattttttagagaaattccttgctggttgtaaaatgcaaactccttgattttgttaattttttgttctttatagaataaatatttaataaaaaaatgaattatggaaagtccacaatctttagtgtctgtttgttgttttattttcattttattaatttgtaataaaatattattactttttaaaaaaaggaaaaatcaagaacttttagaaggaaaatatcaaaaaatgtttagatttaatagaatatttttaattgtcactgactctttaggaattggtgatgatggtagacaaaaagaatttggcgatcaaggagcaaacactttatacagtgcttcaacaacaaaattattagaaatacctacttgaaaaaaattaggtattacaaacatagcgaaattagatggtcactacaaaaaaaacaaagaacctaaagcatatatgggtaaaataattgcaaaatctaatgctaaagatacattagcaggtcactgagaaatgatggggatttgaacacaagtagctaatcctaattttgacaatggctttccacaagaattgttagatgaattagaaaaagaatttgatggtagaaaaattatcggtaataaatctattagtggaactgtgattttacaagaactaggtgatcaagaacaaaatgataaaataattgtttatacttctccagattctactttgcaaatttgtggtaacgaagaaacaatgggtcttgaaaatctttacaaatatgcaaaagcagcaagaagaatttgttcttcaagacctgagtgaaatgttgccagagtaattgctagaccttatgtaaaacaggatggaaaatttataagaacttttaacagacacgattatgcaaatagaccacctcaagaaactgttttaaatagacttcaacaagctggcattaaaactatcggtgttggaaaaattaacgacattttttcgggttttggaattgatcaagtttatggaccagctagtgacaacgaaaatatggatgtagctatcaatatcgcaacttctgatagtaaaaatgaatttattttcgtaaatttagtagaatttgattctagctatggtcacagaagaaatgtagtaggatatgcagaaaatttaaattattttgatataaaattaactaagttaattaatgctctaaaagaagatgatttacttttaatttcttctgatcatggaaatgatcctttatttcctggaacaaatcacactagagaagcacttcctttaactatatattctaaaaaatttcagaacacaaaacaaggattatcaactcacatagactcattagcaactattggaaatattgttgcaaaaaacttcaaaatcaagctttctgatataggtgaagatatttttgataaactaacataaaggcaaatatgacgcaaactaccaacaaaaagtatccttttagtaaacgtagaattcacaggatggaattagttagtttaatttatacctatgaactttttgatagcaaaattaatactaatgaaatttttgcttcttacaatttaagttctgaacaaatcacgattttagaagctattgagaaaaaatatgaaattttacaaaaacttattattaatttcataggacaaaattgaacttgaactagaatattacctttgattcgttctattttgcttttaggaacttgagaattactaatcacagataataaaattgttatcgatgaaatggtgtcaatgactaaagactatactttagaaaatgataatgaatataaatttgtaaatgctgtattggataaaataaatcaattttatgaagacgaaaatcttaaagcatataaaaaaacaattaaaaatccaaagactttgaaagaagtataaaaaactttttaagcacaaacgacaaaggtttttctttgtttttttagatcaattatttgatttaaaaattccagaaaactatatttgtgaatttgaaaaaaaatttatttttacaaacttagaaagggattttgaagctttacttttaaagtttataaacttaagtgctaacaagtcgcttaataaattattagtttcaaatttagctatatttttatattactcttttaaaagaaaaggtaaaattagctttgaaaatgaagcaaaaagaagagattgtttcaataatttttctcttttaatgatgcaagtttcaccagattttaatttttatgttattaaactattagaaaaatttaaataaaaaattatgaaaaaaagtattaaacaacatcttatcgaaatgaattatccaaatgcagaaatcttaattcgttcaggaaaagtcaaggtaaataatgaggttatttttactccaagttatataacaaaacaagtagataaaattacagtggaacaaagcaaagaattcgtttctcgaggagcgtataaattattagcggctattgaaaaatttaacttagattttaataatcaagtgattttggatatcggagcatcaacaggtggttttacacatgtgagtttaatttatggggcaaaatttgtttatgctctagatgttgggaaaaatcaactagattttaaactaagacaaaacactaaagtaaaatccattgaacaaacaaatttgaagtctattgatgaaaaaatgtttgatttagaaattgataaagtagtttgtgatgtatcttttattgggctaaaagaagtttataaagtagttgaaaaaatactaagttcttcaaaagatttaatagttttgttaaagccacaattcgaagcatcttcaaaatatgtagaaaaaggaggttttgtacaagaaaaatatcatgaatttttaataaatagaagtattgaacaagctagtgaacataattttaagtttatagataaaattacttcgccaataaaaggacaaaaatcaaaaaacacagaatatattctttgatataaaaaaacataatgaaaacttatagaaaatattttccaattttaaaaaatattacttatttagactcagctgctctagtacaaaaaccaaaatcagttattgatgctggagtggaattttatacaaaatttgctgtaaatagtcattcacgaaattcgaaattaggcttgataaatgaagaaaaaatagaaattgttagacaaaaaacagctaaattaataaattcacaaacagaagaaataacttttacttctggcactacagaatcgataaatttatttgttttaatgtataaaaattttattaagaaaaatgatgaaattcttttaagcagttataatcatacttctaatttgattccttgatttaatctagcaaaagaaaaaaaagctaaaattgttttatccgaaaatatagaaaaagatataaaccctaaaacaaaaattatttctttttctcaaaaaacaaataatataaatgttgaaataaatattaaaaaaattaaaaaattagctttaaaaaacaaggctattgtagtaaacgatgcaactcaagctatcaactctcaagaagtagattttgatgattttgatgttgttgcttttagtagtaataaaacttatggaccaacaggtttaggtgttttagctataaaaaagaagcttttaaataaattaaaacctataaaaacaggtggtggtactgtttcaactatcgttgatgaaacaaattgaacttattatgaaaatgtgaataaatttgaagctggaacactaaatttagctgcaatttgagaattcgaaaagtctttggatctgatagaagaagttggaataaaaaaaataaatttacaactaaaaaaaatatcaaattacttgtacgatgaactcagcaagataaaagacattaagatttatggacaaaggggtgatagcatacttttatttaatattaaaaatgttcctgcacaagatattagttcatatttaggtcataataatatttttgtaaggagtggaacattttgtgctcctttaatttcaaatattttaaaagaagattcttttgtgagagtttctcttgctttttataataacaaaaaagacattgatgttttgataaaatatttaaaaaattatgaagggtttttagattttgtataacgattttaattatagaagaaaaaaaattatggaaacatttactagtccaaaaaacaaagtaaatgaattaaatccaagttggacaattataaattcttttagttcaacatgcgatgataatttaaatttagctttaaaaatgaaggataatttagtaatagatgctcaattcaaggctaaaggttgttctttgtttctagcttctactgatattttactagaagaaattaagaacaaaacatttgaacaaataaataaaatttttcaagattatgaacaaatgttaaaaactcaagaaatcaatttaactttaaatgatttaaatattttcataaatacaaaaaatcatttaaatagacttcaatgtgttttattagctaaaaatgcagtagaaaaattaataaaagaaaagtagtcatggaatttaaaatacaaaaattaatctctcaatcaggattttgctcacgaagaaaagcagaagaactaattttgcaaaatagagtttttgtaaacggaaaattagcgacaattggacaaaaagcttcatttaatgacgagattaaaatagataataaaatacttaaaaaagcttcatttttatattatgctttttataaaccaaaaagagtcgtgtgcacaagagaagataactttgatagaaaaaaaataatagatttctttccaaaagaagaatatttatacactatcggacgacttgattataatacaacaggaattattttgttaactaatgacggtgatttagcaaataagttaatgcatcccaaatttgaaattcaaagaacttatttagtccacacaaacaatgatttgaccgatgtgcaaataagttttttaaataaaaataaaataaaattaaataatgggatagattcattgcaaaaagttgaaaaaaaagggacaaaaaaatatattgtaaagttaaaacaaggttcaaaccatcacgttaaaagactttttgattattttaatatagaagttttaggcttaaaaagactagaatttgcaggtattactttagctaatttagaagttggacaatatagaaaattaaacataaaagaaattaaattttcaaagagtttagctacgataagcttaaaaaatgaaggaaaaagaagaaaattaactaagtaagttgttaatgtaaacatttaacttatcaatgccgatttttttcgatgaagatatcaaaaaatatggataacctaaattatctatagatttaattatcttatgtttttgactttgattaattttatctatttttgtagcgactaatactacttctttgttcaattgttttaaaaattccagcatttttaaatctaattcagtgatcccaacatttgaatctactaaaacaaaaacagtttttaaattgcttctgttttcaaaatagtctctaagcatagaagaaattaaagatttttgactaatagaaatttttgcaaatccataacctggtaaatcaacaatgacttttttttgttcattataaaaaaagtttaacaactgagttcttccgggttgctttgatgttttggctatcttttgatttgctagtgcattaattaaagaggattttcctacattagatcttccaatgaaactaatttcttgttggttatgttcaaatcaagatgattttgctgatgctgattttataaaacttcacatagttatattcctttttaagtaattttaatgtaataaaaaaatatgaaaaacaaaaaaccagaattatattaatttctggtttttttcttagacaaaattatattatttattaaagatttttgctgcgttttgagcaatcaataattcttcatttgtcttgattacaaagacatttaaatcagaatctggagctgaaattttttctacttctgcaaaatctgataatggtttttcattaatttctttatcaattacaatgttaaatttagggaaattaattttacttaaaactaaattacgaactaaagcagcgttttctccaacaccacctgtaaacacgatcccatcgatgtcttttccaactttgttgatgtaattaattaaataatcagcaattttttgtgtgtatagattaagagcaaattctgcgtctttgtttccttcttttcttgcttgaagtaagtctctaacatcagaagaaattcctgaaactcctaaaagtcctgattttttgtttaacatatcagtaaattcagccactgttatttttgtttcacttactacaaattgatgaatagaaggatcaatatcaccacttcttgttcccatcattactccagctaaaggtgttagacccatagatgtatcaattgattttgaatctttaactgcacataatgaagcaccatttccgatatgtaagttaacaaaatttactttatctttattaaaaatttcttccattttgtttgttatatatctatgactaattccatgaaaaccatattttttgattccatgttctttagcaaattttaaatcaattggataagtatgatttacagctgggatgctggtgtgaaatgctgtatcgaaattagctgaaatttttactttaggtaatatttcttgaatggctttcatagtttgaacagcacctggattatgtaaaggagcaaattttgaaagtttttcaataatgtttatttcttttgttgtcaatgcagtaggtccattaaattcacttcctccatgaaccactctaaatcctgcgatctctatttcatttacatctttaatgattgcattttgtaatcaaattttaatcaaaacagtcattgattctttatgattttttacttcttgttcttttagtcaagattgatttcctaattttgttttaaaaaatgaacctgcaattcctattctttctactataccgcttgagtgtaattccatagtttcttttaaaaacatagatcatttaatagaagatgatcctgcatttataactaaaattttgtttttcatctttattttgtcccttctgattgtaaagctgtaattaaagctgtgttaaatatatcttgcactgttgaacctctagataaatcgttaattggctttgcaacacctgtaataataggtcctattgctccgaaaccacctaaacgttgcgcaattttatatcctatgtttcctgcatttaaattaggaaaaatcaagacatttacaggatctaaattcatctcacctttgtatttggcttttctaattgctaaatcaactgcagcatcaaattgaatttcacccaaggcttttttctctgctgtttggttatataaattagttgctgtttctatagcttcagcttctggactttttcctgaacctgatgttgaaaatgataagaatgcaacgtttggattaaagcctaaattttttgcaaataaagttgcattttgcccaatttcagcaagttgttctggactaggagaaatatttactgaaatatcactaaaaataaatctttgatcttctctgtgcataatcataactgaagaaattgttttaattcctttaactggtccgataactttaaaagctgctcttaaaatgtctgcagtaggaaattcaagtcctccaattactccatctactagtccttttctaagaagcattgaagcatagaaaggaagggttttcatagatttaagtgaagattcttctgtttcttttccttttctgaattcaaaaaattcttttgcaaaagcttgaattttttcttctgacattacttcaatgtcaacaccttttgaatcgaatttttcttcacagagaagaataggatgaactaaaccttgatcttttaattgttttgctgcttcaacagctctaggatctattccatcaataattaatatttttttaattcctgataatttttgatttgataaaactaaattttctagttctttttgataactcataattgtccttttctaaatgtaaaaattacttaaaattataaattaaaactttttaaattgttaaatttaactttaaaaataaaaaataaattaatttgtaaaaaatttaaattgtggtattatttattagcgtggtcgcgtagctcagttggatagagcacgagccttctaagcttgtggtcagaggttcgaatcctctcgtgatcgccatttttttattgccttttttcatatttttgttttaaaattaagtaaatttatcagtatttcacacaatggaggaagaaaatttactatgaaatttaaacaaaaattaatacttgtcagtgcaattcctttaagcttaattactttaatttcttgcgagaataaagttgaatacaaaaaacctattaaaccaaacatagaaactacagaaccaaacaaagaacctatagaaacaaaaaaagaagctgaagatccaaacaaagaagctacagaaacaaaaaaagaagctacagaagcaaacaaaaaacctatagaaacaaaaaaagaagctacagaacacaatgatattagtgttaatgacttttataattttgatgattttttaaatcctgataatggatttgttcataaaaacttttttacaaaaaaagttgaagataacaaatatcaaaagttttatagattttataaatttatttatgaagataaatgaagaaaaaagaacgataaatttgtttggagtatagaacttgatgaaattaataaaattttaaataaagataaagaagttgaaaatccaacaatatgattttacacagatgtaagagataatgttgaagatttagataaatttcatagttcagcaacagacagaccgattttcaatggaattcctaaatttgagtttaaaaatcaacaaaactttagttctataggaagtaaagaaaaatataataagttaaaatttcaaataggtattagctttaatttaaatgattttttaaaaaagaatatatttaaattcaaacttaaaaataactatgaaattgaagcgaaattagaagataataaaataaacttttatttatcaaattcagttgctaaattaagtgatgacataacatttgttagaaacacttaccaagcatatcaaaatttaaaaaatgaagaaaaatcaagcaaagaagacttaaataacttgccaaatattagattattgatgcctaataattcatttgtttcgctttcttttactactgataataaggaaaataaaactatagaaaaatacatttatccttcacagtatacaaaagaaactattacttatgataaacaagacaaaataattgaaaacgatgataaaagatatgaatgattgccaaaaactgttgatatttttcctgatgattgaataaatttagttgatccaaatccttcgaaaaccttcgtaaaaaatccaaatgcatttgataagtctactcaagatccattaacttcattcgataatgctttgaataaaactatgactaataactttgtaaattcaatggaaagaattttaaactataataagtttgatccaagaattgaagatttacaagttagaagttttggaaaccgtggaacatatacaatgattgcaaaagtcaaacctcatgatgatgaagatcaaagatattatgttttatctaatagacacgttgtagattctatttgagcagatatagatggagatgatacagaagaacaagtgcaagaaaaattaaaaagagcaaaaacttctacttataattgaccactaaaagatggcgaagaactaacaaataatgttctttacaaagtgcctgtggagcaatgaaacaaaagaccattgtatggaaaaactgaatttgaaactaaatataatatttcaacttctaacttttttgaaagctttttaaaagtagtatgagttcctaataacattaaaacaaaacctgttcaatttcaagacaatccagaagaaaaactagcgaccaacacaattgatatggctatttctatcattgatttaaaacctgtatttactcttcttgatagagctttactagatcaaacattatcgcttccttatgttcaagatattgcaagaaaagaagaaaaacaaaggattattgactgattaacaggtactaaaaatgacttagaaaaatgaaaaacattagaacctctaaaatttggaaatagttttgcaaacttaaataacggtgaatacttaacaaatttttacatctcagcttatcctagacaaagaacaaatgtggtttataaaattaataaagtaaattatttagaatctagaataacttatcatcatgactattatttacatgttctaggagctgataacaaacctattttaactcaacctggaccaccacgtggaaatggtttagtaggtggagcttctggttctttaattgtggatcagcaaggaaatattcaagcaattcactcgttagcgatggatgtatttggagattcttatgaatataacaacggaactgatgtagcctttccttttatttcaaaattaagagatgtaatttcttatgataaagataatccaaacacatttggttcttgattaaaacaaaaagctaaagaagatccacagcattttgaagaattagatatttatataaatcctcaaaaatactgaaaaaattaataaaaggagtaaaattattatttaatgaaattaaaaaaaataaaacttcttttagcttttgttccaactcttgttcttgcaagctgttcttttaatactaatgttggtactcaaaatccatcacagcaagaagaactttcaaaacaaccaactaaagaagatgaaaacaaacatgtagattctgcaaatccagactcaaatcttactccagttgacgcagacaaagaagaatcttcaaaacagccacctaaacaaggcgagaacaaacatgtagattctgaaaatccagatacgaatctaactcgaattgacgcaaacaaagaagaagaatcaacaaaaattattcagcatcctgaatttgaaaattcagataatttaggtaacaaaaatgagcaacctagcaaggaaaatgaaggattaattcacgaaaattcacaaagtgatattagtgataaaaatacttctcaaactataactgttcaagttcgaaaaccagatttggttaaagatattaataaaaatcctataaaaaagaaggtttttgatcaatctttttcaaaagtaagtttggatgaaataagcaaaaatattagatttccaaaggaatatcagaaaataaaaacaaattatgaatctggttttatagaaaaagaaaatgataatgcttttttaggtaatcaaaatgataatttatttgtttatgatcttaaaaaagcagctgataaaaatcaaattttttctgatagctacactgatgaacaaaaacaaaattatttcgatttaagtaagaaaattagaaatgattactattctctttatcatacacaagaaaataaaatatgaaaagatgtagataaaatagcctttaattctttagaaaacgatgataagagatttgaagatatttttgaaagaaatttaagaatttctgtaggaacttcaacaattttagatactaaagacggaaaagcattactagtaacaaaccaacacgtaactagacctatgaagcttcaagatatagattctaaacattcacattttaatatcagaaacaaggaaaatttaagattttataactatattttgaatgatttttttaaaatttattataaaaataaagtttattcattttcaaatgacacttttttgagttgacagtgacaaaagtataaatactataaatttttaaactcagatgcaaataattttattaataaaggaacgtattcttcagctcaaattgatagtttaagtaacaaaagtttttcagaacaagaaattttagattttcaaattaatttctttaataaatactttaaaatagttcaaaattttgacaataaacgtcaagatattgctttatattactttaattttcaagaatatatcaaagactgaaaagaaatcatcgaatgagtttctgctatatgagatacagaagatacttctgatatagatgagcgaacttatgctaacatacacaatcaaaaaaagaatatacaagagagagattttttcgatgttggttgaccatttttttctaatttcagaccaaaacaaaataaaataactaaaaatatttatttagatagttccaaaaccagctttattggcgcagataattattattttgttattcctaaatataacaagacattgcgggaactaaatgaatatagaaaatctgtaaaaaaagagaaagaaaaaatagcacaagaaagagaaaaattaaagattttcaaagaatattgagatcacatctcaactttaaaaccagtaaaaattagtgataaaatttgaaaagaaaatgactttgatgattcattaaaaatcagtgctttttgacctaaaaatactatttttaaaaatgtgtttaaaggaattaaagtaaatgctgttccaatttatggcaaagatgaaggtgatctaaactcattttactttgtaaataacggtcatggagcttctggttcaggaatatttaacagagatggttcacttgcgtttataaactcatttggcttcttatttgaaggaaaagacccagttactcgtaaacctgtttctaatacattttatttagattctaacttaaatacatttttatctggtggtgtggtcttaagaacaaatcgctataatttagttgatgaaatttataaattttatttaaataaacctgaagaaaaaaattaaaaacataaaggaaaatgaagaaaaatatgcataataaatcaagatatctgtttgttttagaccttgacggaacagtattgtctaattccgctaccggtgaaattcacgaagaaacagaaagagaaattaaaagggctacctctttaggtcacaaagtgtgcatcataacaggaagaccttgaagatctactaaaaaaatatatgatcaattagaattagatactattgtaggaaatttcaatggtgcttatgtacacaatccaaaagactataattttattcctgaaattaagtatttaaatttaaacgaaatgctttacattttaggtgataaaaaattaaaatctgaaattacaaatcttgctattgaaggtccaggttgagcaaaaatacaaaaaagagatgaaaatttagaaaaagtttttggctttaatgaacttccaaatttaaaagctggaatcgatcttaagaaaattccacttaagccaactggggttattttagatactaaaattactactaacgttgcagaattaaaatcttacttagaaagaaaatacggagatttaggagaattttcagcttgatcaaaaggcgaaggtcaatcatatgtttttgacattacttctgttggagttaataaatcaaaggttgtttctatgctaactcgttattataatatcgatttagataatgtaatttctatcggtgatggatttaatgatgtaggtatgtttgaaacggctacagtttctgttgcaatgaaaaattctgatcaagatttaaaaagaaaagctactgttgtgttgaaaaaaacaaacaaagagggtggagttggttattacattaaaaagtttttaaaaaatcctgaaaaagaaatagaaaaatcaaagaaaatgaagtctttaaagtcttctttagccttggatatcgaagctattgggggacaataaaatggaaactgttcaaaaaattgctatttttggagggacttttaaccctatacataaaggtcatgttaagattgcaaaactcgcaattgaaaaactaaatttagattggttatactttgttcctaattatcaaaatccttttaaaaacaagcaacaatccttcgttagtggtgaacatcgatacaatatgataaaactggttttacctgaaaaagcaaaggtttgcgagtttgaaatcaacaaaaaaggaattagttatacaattgatactataaaattttttaaacacagatttaaaaatgctcaactttatttcataattggttcagataatttagaaagacttcataagtgaaaagacatcaatcaaatatcacaacttagtcaaatctgtgtttttaaaagagataaaaaaataaataagaaaaacttaaaaaaatacaatgcaattttatttgataataaaatttatgatttttcttcaacagatattaggcattctgattttagcggtctttttcctgctgttcataaatatatttcaaataattacttatatatagaagatttattaaaatttcacgttaataatggagagagattaaagcattgttattcaacagctgaattagcagctgaatatgcaaaaatccttcaaaaagatgctaaaacggcttattatgcaggacttttgcacgatattactaagacttgatcaatagaaaaacatagagagtttttggaacaacacaacatagatcaaagtcaagttccgaattataaattacatcaacttagtgcttatgtttgactaacaaaagaatataaaattgcaaacaaaaatatagccaaagctatttcttgccatacatctctttctttagatatggatatttatgcgaaaattgtttatatggctgataaattagctagaggaagaagatatccaggaatacaaaaattaagagacatagcaaaaaaagactttaatcaaggctttaaagaagttttaaaagcaaatttaaatttattacaatcgcaagggaaaatagatgaggagcaacaaaaaatttacgaattttgaatcaaccaataatatcgctattttatttgcagatccttctgaatttatagagttaaaagaatttagctttataaatgaagcaaaaacagtaaaaacaccttatggaattggttatatttttcaactaaaaagctttaatatttattattttcaagttgcaatagggcttattaatgccgctgctgcttgccaatatttaattgataaatataatattaaaactgtttttaactatggagctgtcggaacaagtaattctaaactaaaaattggtgaaataatttttccaaataaaatttatctttctgatgcagaaacaccttgatatagttttggtcaaacaccatatgaaaaacaatattatttaaataatttttctaacgtaaatgaagatattaatttagcttcatcaaatgcttttatatctgatttaaatcgtttagcttatattcaaaagcatattgatgtaaacatttttgatatggaggcttttgctttagctcatgtttgctttaaaaataaagtaaaattcaaaactttaaaatacgtttctgactatatcggacagaattcatcaagtgaaattgtaaatgcaaacattaaaaaggggtctttaaaagctctaagtaaagtgtttgattttattgtttcaaacgaggaagttaagtaaaaaaatacacttataagtgtatttttttacattattttaaatcgtcttcaataatttttttaacttgctcaatttttgttcttttttgttcaaaagtaagattttgtgttttaaaatcttgtgtcattttgataaaggctggatgataaccaatacctaaaggtttttcaaatactttgtttaatcttattcaactatctcttagtctagtgtacacaattttatttggattatttttataattttttagtaaatataagtgtgtaattaacactataatacctgtactgttaataacttttttaaatgttctgtttcagttgactggaatataaaaaatcgcaataattaccaaacaaaatgaaggggcgaaagtagaaacttcaagttttcctattaattttaaagcatcttcacttggaaatcttggtacttgaataaatgcattaataaacaatggagtaaaaataaataagattctaattaataagtttataaaagtaaagattgaatttcaaatatagtaagaaacaagtcggctataatcacccttattttttattgtattaatataaatacctagcaatacaaatagaagaactagtgataaaattacaatgtaaataacataattttctacacgataattttggaagccaccataaacagttcaaaataaaaatcagaataaagaaacaaataaaatagctaaagttttgtaaattgatttagataaaaatgacattttatctcataagttatcaccactttcatttttagctgaagggtttttttcagatttttctaaattattaataatgtcactatttaaaagtttaaagtttgcgcttcaagcaactaatttttctttgtaatcctttttagaatcaacgtcttcaagatgttcgattgaattgattttagacatttcagacagaaattcttgctcttctttagataaagaatcattagtttctagttcaacttttttctttttagatttattaaaaggggttttagaaaaaattctagctaatcaattttctttttttgtttctgtttttacttctttttctgaagtaggttcatttttagtattgaatgaattatcttcaaacaaaaaatcttctggatttgaatttagttgatcttcgtgttgttgctcttcgaataaatttaaagctttttgatgttcatctcattcaatttcttttgtaacttgttgttctaattcttgattaaaccacttatcttcttcttcatcagaactattaactaaattttctggtggttcaatactaaagtcttcgtcttggtgttctgtttcttcaagttctgcttcattttgaagcaaaaaatcaagattttgttgatataaatcgttattttgtttttgttgattatcttgtggtatttgaggttcatccaacttaatatcatcaaaaacattattttcccaagttgattcattttgtattttttcatcatcttgtggatttctttttttatttataaatttaaatttcatatcaaataattttatattattttttgtaaaacaaaattatttaatagttatgagtatcatcaaaaccatttctaatttggtgaataattctatcttttattcttggatacttattactttcaaaacgatcactagaagctgatcaataaatcattggtactaaatcgtcttttagatagttatttttatctcttcgtgttttgattaatcaaccgccggttggtgtatattttccataaaatacttttattaaatcttggatttttttgtctttggaagaagttaaatatttatatacttcagcaattcctgtagttgcatttaaatcatcttttcagaaaccatggacttgcactatagtagctgcatctctaaataattcttctcaaactgttaataataaaattgctgttagtctaaaaatcattcgaccttctggataatgtcagtaattatattttgtaatttcttgacctgaatgtcttattttaaaatcatcataaatgtattttactaaagttcctattttatttacatctacttgaccgccaccagcatctgcttgtccgccagagcctccagaagaaccaccagatccgccagaagatccagaagaagaaccaaaagtaccaggaggtaattgtcctgttcaagaaattgcttgatgcttaggatttaagttatcaaagtgtcttaaaataggagaaatgtcttcttttttcttgttattttctttatttcaatctgatgatgtattaaatattaaatctaaaaagtttactaatgactcaattttaattttaggtttatttggatctgggttatttggatcttctatcgaatcaataagcgctaagactttatctgttgagaaaaagtcactatcagcaaaaatagtagacagagtcgagcttatctttgtaatattaatttcttcatttttgtttgcaaataattcaacaactttattaattatgtcactaactaacttaatgtttttagctgaatgagcaacatttttaatgaagttttttattttttgtttgtcttcgtttctagttagatgaataagttttaatttgtcttttattaagtcaactacaacatttccaacttcatcatattcagagatttttgctagtaaatcaaaaaagtattcttttaaaatttctttatttttacttacaagtaaagggattattgattgaatagattttaaagattcgatttcttcttttttaaagtttattgagtttactaatttatcaataaacaaactagttttatctcaagaaataatttgtttaattattggtttggcttgcttttgtgataaaacattttttgtgtaagcatttgtatctaaaaaacttaaatttaatttatttatttgatcattaataaaatcggattttaataatttatttaataaagaaactaaatgtgttttttgtgattgtgaagatgtatttgaaataattaataaaagttccttcacaaaatgaagcatttcttcttgactaaagcttatattaatatctgatttcttagaaagtttagctactaataaatcaaatattttgtctaaaacaatatcaaaagaagttttattggatacgtttgagtctgaaagtttgtatttatctgaagaaaattctttgatggtgtaaactaaaaattcagtttctgcttcattaatttgaacattaaattctacttcaaagacttttttaaataaactttttacttctacaagattaatattttcttgcacaagttgttttacaacgtttttaaaagcttcttttttgttgtttaaaaatttaataaataaagaagtaaatgactcacctgaaggattttgtgcttctttttgtaaatcttgtttattagattttatataatcaaatactaatttaataacatcgtttattttattagaatcaatcaatttatctactagtgagtaaagttcttgacttaataaagaatggtatttgttagataatgttgaaatagattttttaaatgtgtttttagcaatatcactttttaaaatatttttaacaacactagctagtttttgataattattttctttaaactcgttattgtctaagatctctgcaaaatcaaggattaagttaataatatctgaatttttaaaatcaaattttatatcttttttattatctaaataagcaattaaaaacttgtgaatttcttctaaaataaagcttactgtttttgatggtttataatcagaatggcttttgtttgcttcattatcaacatctttttgtaataaagctttaattactttgagtattgttaaaacattttcatcactaaaatttattcctaaagatttaaagtttttgtgaataattgaattaattagtgaataaacattttgtctatctatattttctaatataaattctttaaataatttattgatatcttcttttttgttaattaaaaagtcttttaataatttagtaatgctaaagtcattatcattaacattaaatttagaagcataagctataaaaaggtcaacaaaacttttaaatgaagaagaggaaattatttgatcatataaattattaaatatttgtcttgaatttgaagtattttcttcaactgtaaagttaatatatttaaagattaattttttaactaaatcagatcttaaaacttcttgtgctaagtcaaaaagtttattaattgttaaatctggattatgagattctttagaaataaagctaatttctcttaataaatttacaatatttttttcagggaataatttggttattgaaaaatatttatctaagttatcaaagttttgttcatcactttttaaatatttaaatataagtgatcaaaattggtctagagttgcttgaattactgaaggaatttgtttattttcgtatggaaaacgattgattaaagcttcaaataaagcaatcaaagttcgttgagaactttcacctaaagttatgtactgattattagaaattatattttttaaaatagaattaaatttattgttattaatattttctgaaataaaattaaaaataatagattcaataaaatttgctctaagttcaattcaggcacctaaaaactgcttagctgtttttagattttggaaacgatctttgtgatttataaaaaaatcatcaagaattaattcaacagtttcttttacatcattgttatttgttaaatgagataacatcaaggaaattaactctttaagattttcatctttaatatctgcgaaattataaattgtgtttttagcttcatcagtttctaagaaattataaagcggtaaaagtgcatctttgataatacctaattgtccaatattaatatctaaattatgtaaatcatttaaaagagtagtaaaagtttcttcacttactaaagatgctgcaatttttttagatttttcaataattttgtttattatttttaaatttgttaagtcttcttttgttgaagaatttagtactgaaataatttcggaagtaaatttttcttgaattattgaaaatagttttgtatttaagatttgatcattaaatgaatggattgttgaagaaatttgttctatagtgctagggtctatatcaatatttagaccatttgctactagtttaataatggaagaaataacaacatcatttttaagagtttccttggcaaaattttggaaaaagtctttaagtttgtttatattttcttctttggaaaggaaaattggaaaaatatctgaaatttgattaatttttaaatattcatctttattttctacaatttcatctacaacttgttttataaaatcataaaatgattgaaatctaacgatcgcattaatagttgttttatctatcttatcacttagatttatattggaaacaacaaaatctttaacgtatttatttgtaaatattaaatccaaaattattgatttaaacatttctttattttctgttattaattttgaatttaatatagagtgcaaaaagtcaattaagtctttttcttttactcctttctctttaataaaacttaacatatcatctaaagtaggttgtttattagctttattgacatattcctcaaaggaagtcataatattagaaaataaattagtttcaaatatttcttttaagaaggaaggaaaatcagaattttgaattaaacttttaacattttgcttgatatctgtagttaagtttgaatcgtttatgatttcaaaaagaacagatttattagtaattaaataagcagttaaaatgttttttcaagcttgagtagctgttttattagctttgaaatgttggatttgtaatggtgcatctaattgtgtgatttgttcagatcaactattaatatttttattacctactaatttttcaattatttgttcatttgttaatttaaaatcaatttgttgtttgtaataattttgatcttgtaataaataattttgatttcaataaggaattaaggttaaaagatttgaatttgtactttgttttaaagctaatttaagaaaaatttcttgtgccattttcttataaccaaaagtagaagggtgaatatctaattggtttttcattcactcttttttatgtaattctcataagtgtgtatcatatgcactgataaaatttactttattttctgaagcaacttgcttgatttgttcatttaatttttttattatgtctgaaacataatttttttctatgttgaaattattttctaaaattgaactaaataaactagctacagcagttaaattttctgcataaccaattaaattaatatttgtttttggatttatttttttaatcaaagttattagcttggataaattttgatgaacttgttttaatttagtattttgagattctttaaattgattaactaattcttcttttattactaaatttttttctttttgtattcgaattaaaagatcaaaatctaaagaaaatattaaatcgttagcacctaaagaaagagttattaaattagaatcttttactttttgaattaatttagggaaactagagttttcaaagtcattgaaaacgtctttaattacatctgcaaagggattttgggtttgtttgtcaagttctaaagtaaatttaagtatttctttgttttgtttagcttcattttccttgctaggatctaaaagataaagtcaatttttaatagtgctacctgaaagagctaaattatcaaaagaaactaaagcatcagatttaaccatttgaatgtagtttgctaagtatgctggataagaaagtccactaacttggttgttaacataatttcctcttatatcatttcctgattcaaggttaaaacctgctgttatagaatctccgattgcaagataatttactttttcaattaatgtattagagttgttagatttaagttcgtccattggtaagttatctgatgtatctttttttgttaatttgggcgctgaataaatagcaattgatgttatcccaactcctgctgcagctactaatgaaccagctaaaattttcatttttttcgctttagtcattgtttttctcctttgcgattagtacttattaaaaaaaattataaaaatgtttttattaattcacttttagttttattatatttagtttttgattaatgcaattttttaagttgaaattaatatagaagatttttataatcagattgaaaagtattgcaattatttgtttaattgtaccactttatagcttgttttcttctttttaaaccacattttaaattttgtaaataaaaaaaacgtaaaaaaattttgaaatttttattttaggaatataatatttaagatttcattcaagttaatgagattaaataaatatattttattttaaatataaatttaatattgataagaaattatcctttcacataataattaaaaaaaactggtgcgctggttttttttttttttgttttgaaagagtatgaaaagaaagcataattttaaaaaggaacaaaatgcatagatttttcgtgtttcaaaaaatagataactattttattttagataaaagagttttacaacatttaaaagtaataaaatccagaaataacaaattcatttgtgtttttgaaaaaaaattttatataactaaatttgtttttcctaataaagctgaaattatagaagaattagatgaaaaccatgaattcaaaaataaaacaatattagcagttgcaatattaaaaacaaaagcatttgaatgagttttacaaaaagcagtcgaacttggagtgcatcaaattatccctttttatagcgaacatgtagaacaaaagctaggaaataatattgaaaaaaagatagaaagatgacaagaaatagttcttcatgctgctcaacaatcttttagaaatataattcctgaagttgaaaaacctgtcgattttgaacaagttttaaatattgaaaaaagcttcaaatttatagcacatgaaaaggaaaatgaagaaaactctaaattattatttgattctgattctatttttttaataggtcctgaaggtggtttttcagatagagaaatccaaaaagccaaggaaaaaaacttccagattatttctttaggaaaaagaattttaagagctgaaacagctgcagttttttgtttatctagagtaaaagaagattaacatatctgtcaagtaaaaatgcttgacactttttaaaaatatattataatttaaaaaaatttataaaactaataactagaaaggtaaataatggtaaaaatcagattaaaaagaatgggttcaaaatttaatccaatatacaaaattgttatagctgatgcaagagctgcaagagatggaagatttatccaagcagttggtcactataatccaaaaacaaaagaaacaaaattagaaaaagaacaaattttaaattgattaaatttaggagcagttcctacagaaacagttaaaactttacttaaaaaagaacaaattttagctctttttactaaacaaaaattacaaaataaaactaaataaaaacagtgaaaattaattttttaacactctttcctaaatattttgaaccttttaaaaatgagtcaatcatttcaaaagctattgaaaaaaaattaatagaaataaatattatagatataagagattttagtaaaaacaagcatttaaaagtagatgatcaaatttatggtggtggacctggaatgttaatgcaaatcgaaccgatcgacttagctttacaaactgtttcaggctttaagatagcaatgtcgccacaaggtaaacaatttagtcaaaaacttgcatatcaattatcaaaagaaaaagaaattactataatttcgggaagatatgaaggatttgatgaaagagtaattgatcatttagtagatttagaactttcaattggtgattatgtattaacaggtggcgaacttccttcaatgattgtagcagatgctgttgcaagattagttgaaggagttataaatcaagaatctttagaaaatgaatcatttagtaaaaatatgcttgattttccacaatacacaagacccagagactataaaggtatgaaagttccagaagttcttttttcaggcaatcatgctctaattcagaagtgaaaagaagaaaaaagacttgaaaaaacaagaaaaaatagaccagatttattaaaaaaagacaaggaagattatgaaaaataatttattacaaattgttgaaaactcacaaattaaaaaagaaactcctgtatacaacgtaggagataacgttaaggtttatgtaaaaattaaagagggaaacaaacaaagaattcagatttttgaaggtctagttatagcaaaaaaaggttctggactaaaagaaagatttgtagttcgtaaagtttcatatggaattggtatcgaaagaagttttgcgcttcattctcctttaattgaaaaattagaagttgttcgttcaaacaaagtaagaagagcaaaactatacttcatgcgtgatagaaaaggaaaagcagctcgtttaaaagaaattaaaagaacatcagaaaaataataattggatttatgaaaaatgagtaaattagttattgttgagtcaccaaacaagattaaaacaatttccaaatacctaggagaaggatacaaagtagtagcttcagtaggtcatgtcgtaaatctaaaaacttcaggaacttatggtttaggtattgatatgcaaaattgagaaccagtttatgaagttgaaagtgataaaaaagaaattgttaaaagtctaaaagaagatgttaaaaattcagagatggtaataatagcaaccgatgctgaccgtgaaggtgaagctattggacacaccttagtagatttgttgaaaatcgaagacaaataccaaagaatcaaatacaacgaaattactgaaagtgcaattttacagtctctagaacatcctttaaaaattgatacaaatttagtaaatgcacaaaaatcaagaagaatgattgatagaatcattggttttagattatcaaatttactagcagctaaaattaaaaacactccaattacaccttcagctggaagagttcagtctgtggctcttaagttagtaattgatcgtgaaaaagaaataaatgcttttgttccttatcattattttacaatttctgcgtttcataacaaagatgtagaaattaaatattacaatccagaaaacgaaaatcctgaatgagtagatttaaaagacattgataaaatttataattctctaaaaggaaatttggtattagttgataaaatcattcgaagtaaaaaagatgcaaaaataactccattaaagcaatctgctttgtttaaaaaggcttctaattgggcagcaagctctgtttctgcttcattacaaagactttatgaaggattcggtgatcaaggtcttatttcatatccaagaacagattcaactagattaagtcaaacttttatcgattcagcaaaatcttatattgaagagacttttggtaaagaatacgtttcagattcagtaaaaggatttagcggagatcaagatgctcatgaagcgattagacctactgattgttcattaactcctgaactcgcaaaagaaaaatacgaattaaaagacattgattttaaaatctatcaaattgtttataacactacaatgcaagccattatgtctgttcctgaaagacaaataacaagatatgagtttctaaataaagaacataaattctatctttcaggttcgataattacttttgatggttattttaaattaacaaaagctgatagcgaaaacacagatttaccaaagtgaaatattaatgatgaagtagaaatagaaaaatacgaaaaagaagctcatcaaacaaatccaccagctagatatacagatggttctttaattgaaaagctagatgaagttaaagtcggaagaccttctacttttgcttcatctgcaaagatattacaagatcgtttatatgttgaaaaacaaaacaaatcacttgtacctacagcttatggacaaattactttagataaattattacaaattagtccttcaattattaacacaaattacacagcacaagtagaagaagaattagatgaaattgctgaaggaaacttggattataaaaaattaatgtctgagttttgagaaaactttcaaagcgtagtacaagattcgttccaaaatgtagaaaaaacacaaattgaactggaaaaagtaggtgaaaactgtcctgaatgttcttctgaattaatttatcgaaataacaaaaaaactggcgcaagatttattggttgttctaattttccaaattgtagatttatcaaacaagatccaaattacaaaccaaaatttaaacgcttttataaaaagcaaactaatgaaacaaaatagaaaaggggctgattatgtttaatcaaacttcaactttaatcattgttttagttttactagttgcttttatcgttgtatttattttattcaatttcttttcagaaagaaagaaaaagcagaaaataatcaaagaaaaagaaagaattaaacaagaagaagttaaattcatattaaaaaccagtgcaagagtaaatgcaataattgaacttaataatcaattattagatgaatttcaagtttccattggtgattttaagatgagtcaaattaataatctagcaaaaaacgcacttgattatatttatattcaagaacagtttcaagacatttttattcgtaatccttttgaaaaagatgaattgtttttagctagttttgtacaattaatgaacttaaaatctaatttatggactaaaaatcacaaggaattattatcttatttttcttctttaaaaacaaaatatttatcagaagaagcaaataaagaagaatttacaaaatatcaaaattcatttttagaaatatatcaagaatttatagatcaagtaaaatctaaaaacaaagatgtaacagagcttttcaatacatttaaagaaaaagatgaagcagaaagacttgaatatctaagaagtgttgaacaagaacaacctaaaactttttttaataaggtaaaaaactttttaaaatttaaaaaataagaagaaaaatgaagaacaaattctttaccttaccaaatgttttaacaatttctagactcattttagtaattccatttattattttgctaagtttattttctagctttaataataacgacatctttggtggctataaaaatacatacatttgaatgttctttctagcttttgctatttttataatagcttctattactgattttttagatggttatattgctagagcaagaaaacaaataagtgtttttggtaaaatttttgatcctattgctgataaaattttaactacttctgccttcattttccttgcagttttagaaattattcctgtttggatagtaattttattcatattaagagacataattgtagatggttgtagaaatctagcagcaagcaaaaaaatcgaaatttcagcctcaatttggggtaaattaaaaactgtagcacaaatgctaactatttgtattttgtttatatttggacctatattatttaataactcatcctacttgatattagaagcaaagataatatactgattgttaaatatcccttcacttattgctttaattttatcaatattttcaggatatttatatgtatcaaatatttgaaagtacttacattaaaattaaaaaaacatctttaatgagcagatccccttttcttaggaaaatagaaaaggggattttttatgaaatattcattagaatttaaattagaatgtgtaaaaaaatacaaaaaaggaattgaaattaaaaagcctgtttttgctaatacaagtcagaaaaattttttaaatcaagtaaatttttgagaaaaaatttatgacaaattaggagttgaaggacttaagaaaaaaccacgaaataaagaatggactataaatgaaagattaaatatagttaaaagatttttagctggtgaaccaattgttaaaatttcacttgaaaataatcttaatccaagtcaaatatctttttgaacgaaaaaatatttagaatcgggaattagtggtttagaattaaaccaaggaagaccaataatgaaatctaaaattgttaatgataaacgttcaaaagtttcagaaaatttaaatagtaaagatcaatctaattctctaacatctgtatatgaagaactaaatgtatatgaagaactaaaacttcttaaagaagaactcaagcattttaaaaaagagaaaaaaaactttgaaaaagaaattaaacttttaaaaaaggaaaatgaagtactaaaaaagtgaaaagccttggtaaagatctttgactcaaatcaaccaaggcaagaaaaaataaaaaaaatttataatagagtaaaagctgacaaaaaccttcgcttaactcaagtattaaaagagttttctattcctatatctactttttattatgaactcaaaaagaagattttgacaagaaaaatgaagaaattataagccaaatgaagcttatttttgacgaaaataaagcaagatatggaaaaagaagaataaaagcagaacttaataatagaggctataaaattggacttaaaaaagttcgcagattaatggaaaaattcaatctcaaagcaatttgtcctagaagaaaatacaaatcttacaaaggaactgtaggcaaaattgcagacaatattttaaatagaaattttgtcgcaactcaaccaaatcaaaaatgaactacagatgtaactgaatttagcggttcatttggaaaagcatatttatcaccaattttagatatgtttaatggtgaagttattgcttgagatttgtctacaagcgctaacatccaacaaattagaaaaatgcttcaaaaagctttttccaaacacaaaaatcttgaaggtttaatttttcacagtgatcaaggttgacagtatcaacatagacaattttcagaaaaattaaaacaaaaaggaataattcagtccagtgtctcgaaaaggaaattgtttagataatagcgttattgaatcgtttttggaacattaaaaagagaatgtttttatggtcgcgaaaaagaatttttaacttttaaacaacttcacaaagcaattgcaaattatatttattattacaatcacaaacgaattaaagacaaaataaaatgaatgtctcccattaaatttaaagaaacattcatttcaaattataattaattaaaacactcaaaaattttagaagaaaagggcaccacctcattaaaaagatgtttttttgtaatttcttttttagtatttttttgttagtattataatttaggcgttatttaacaaatggtggctcatatcggacttgaaccgataagcatttctgcggaaggttttgagtcttctgtgtctaccatttcaccaatgagccttatattcaattttaacacaaaagaatattttgtttaagaatttttagatcggaagttaatatgaaaaatagaaaaatttgaagtccatttatatttttaggtattttttcttttgttggtgcagcaggaataggtatttattatggcttaaaagcatttagtaaatcagaaacagatgttcaaacaaactcttctattatcaataaaaatgaaaaactcgatgatattatttttataagagcaaacagaaaaggaagtggacttttagcttctgaagttgcaagagcagattctattagagaatttgttaacttttatccatatgtttttaatgtgtttaactatgatttaagtaacattaatcaaaatttaaaacttggctataaaattattcctaattctatcgatgacaggcgagggatttttaaaataaacattagtttgttaaaaatatcaaaaactaatcctcaaaaacaagatattattgaacaaaaagtttttacagtctctggttttaaaactactatttcttctgtgttgtcaagaaacgacaacatattatttaaaaatagaacttccagggttttaaattcaatccaagatttaaaacttcaagaagataaaaaaaatgttgatatatctttaataaatgctaaaaacttttgagaatactttgaaattcctgaaggatttaaagttaaagaagaaataaaacttattcctaaaaaagtagaaaattctattaataattttgatttagaaagagataaaaacgtaaaagtaatagatcaaatccaagaaaaacataaaattgttgtattaaaagaaaatgaatcatatgtcttatctgttttagatattttaggttttaacaaaaacaacaaaagttttcaagttgaattagggctaacacatagagaatttaaagataatacagtagctaaatttttaactgtacaaaacaatgattttaattttactaataaactagtagatactgatccaatcaataacgagaatatatctatcaagctaaaaagtaaatattctaactttttaccttcatttttcttcacaaaccgtatattaactacagaagattttaatttatattttgatattcaaaactttgcaaacatagatcaataccaaattgaaatagctcctgagttaaataatgatcaagatggaacttttgctttatatataaagaaaaaagaagcaaattcagataattcatcagataaacaagcacaaaatctacaacctgaaaaattagaagataaacaattaagtaaagaaaacacacaacaaactaataaagaaaacacaagcagaagattaatttatgtacaaggctttaactcttatgatcaaataagtaaaaatatagttaatgatgcaaaaataaacatagataacattaataactactttaatttagaagatgaaagattaagaaaaactgctcttgctaatttaaataatgaagtagcttcagttagttgagattttgtaggtaaacaactaaaaaatttatttgaaggaaaatctgaaaatctaaaattgtttgaaaacacagaaaatctctttggtttttctaaaagtaattattattttgcaagaacttatgactttaaaattgaagataataaactcaagtttgtctttgtaaatgctttaaatgaacaatttaacttgtacattgaatttactcaaaaacctaaagcaactagcatttacacagacacagatggtgaatctaaaagttctgatgaattattttcagatatccacaaaagaacaatggcaattcagtactttgtaaaaaacaccgacgaaaacaacaaaagcgtggtcaaaggaattagtggaactgcttgagtatttgatagagaattagatcaaaatggaaaaccgactggagtttattatttagccacaaatattcacgttgtagaagaatttttaaaaaatccttcaaatgtctatagttttgcttactctctttcaaataaagaagataaattagatttttctcaacaaaatgactttagttttgatgagccaaaatctgattttagacaaattagcaagataacttatgatgaatatggttatccactaagtcctgaaaattaccaagtaaataatagagaaactgcagaattttgagaaaatttcagagtcattcctttaggtctaaattcaaccaaaaacaacaaattccaagacattgcattaattagaattaagtttccaaaagataaagtaataaaacgtggttttagtttggatgatttttttgaaatcaacagatctgaaactaaaattcaaaatgttccagatgctgttaattattacaatgaacatcctttaaaattcttcatttctaataaattttcttgaccaacagatgaaactaacaaagaaatttctttacctatccagctatatttaggtggttatttaagcggagataattgagtagaagctagtcaaaatgcagtattagattctaagaataatttcaaaaaaagcttcaaatatgaaggtaaaacttatacagccagcccttcaatttctttaccaaacatctatagtggacatggaatgagtggttcattagtactaaatcaacaaggacaagcagtaggtattttctgaggaggaattttccctgatgataaaccaaaatctttaactcgtggaattggacaacttgatacttttggcattaaaattgattcaaatgagactgttttatcaaaatgattagatcagtcaaaagacattaatacagaattggataaatatgaacaacaaatcgatcaaatcaaacaataatgaagaaaaaatttgaaaatacgactacaagattcacatcagtaacaaaaatgctcctaatgtagtttttattcacggttttaactcttctcatagtggattttgaagcacttttaaacaaatgcaaaatgtaaattattattcttttacttttccaggaaacaacttaactcacgcttacgattatcaactaaacactttagcatatgcaaaattagtgatcagatttattaaaaaatttcaaatttcaaatcctattttagttggtcattcaatgggtggtggaattgctttaatcgtcaataaactagcacctaaacttgctaaaaaaatagtttgtgtagctccaatgaattacacttcacaagttttaaaacaagatttttttgacttcttctttccgaaaaatattcaagaatatcaaaagtatttagcttttttactttatgacaaatccaaagtagaagatgaaagttttattgaaaaattcagcccattttttagttatgaactttataataatccttcaattttaaagctaggtaagtacttgccaactaatgaaaatatgaatttattaaaaaggtcaattaagactgtaaaagtcccttgtttactaattttaggacaagaagatagaattgtagtaaaacaagctactatagatcattttaaagaaaatattcctcacgttcaagtagaagttataccaaacacatctcatattatttttgaagaacaaccaaaattagttattgaaattttaaataaatttatattttcataatttaaaaattaatttagtaaaattttaatatgaaattttctattctagaccaaggacttattgacaaaatcacaacttcagaagaggcgattcaaaactctataaaattagctcaagttgctgacaaattgggctatttttcatactgagttgctgaacatcataatgttcactctttttcaatttcatgtcctgaaattatgatgatgcaacttgctcatcaaacaaaaaatataaaaatcggggttgcttcaattttatttaatctttattctcctttaagaactgctgaaatgattagtacaatgacaagtgttgtaaaaaatcgtttttattttgctttaggttcaaatccaggaactaaatttattcaaaaagcttttaattattcagctgaatcttctttgacttatcaagaaaaaattaaacatttgtttcactttttaaacatacaatctttaaagtcaatcaaaaatgtaagatccgtaatacaaagtaaagaaaataaagaaatgtttttgacaacttttacattaaaaaacgcaattttagccgctaaattaggtgcaggtttaatagttggtcataactttttgcctgactttgaaaatacaaaaaaaattgttaaaacttatagaaaatattttaaaaaacattgacctgataaagaagaaaaaataatttttcctacatttattgtaactgcagaaaatgaagaaaaaatcaataatttatgaacacccttaaagttttttttacttggcgaagaagactttaataaattttgacattttccttctttagatgatgtaaaagatagattaagtgaagaaaaagaagtagaatctaagttaaaaatacttcctttagttggtagtccaaaatacatttatgatcaactattaaaagtaaaacaacaattaaacattgaacattttttattaattccgatggtgaatcagatagaaaatagaataaaaattttagaattaatgcaaaaggaacacaaaaaaagacaaaatggaaaaatttgctaattatttattaattaaaaaagaaaacaatatttattcaattcatttaacaccagaattacaagatgacattggaactgtaggctatttaaagtttactgacgaaaaagaagttagaaaagacgagctaattttagtaatagaagcttcaaaaaccattatgacaattaaaacacctttacaaggaacaattattgacaaaaatactcaagcaattgcaaatcctactttattaaattcttcaaaatttgaagaaaattgaattgtcaaattaactaatgtagatgagaaagcgtttttagctcttgaagattattaataacatctgaaattctttaaacaaagaatttcattctagctcagataaattattatccttgataaatgaagcagagtttatagtagtaggaattggctctggtctaactagtgcagacggaataggatatagtggtaatagatttgaagataatttttctgattttataaagaaatataaatttttagatatgcttcaagcttctttatttcactatcctgattgacaaacttattgagcttttcacagtagatttattaaacttaattatctagaacaaccagcaggaaaatcttttataaatctttacaaaatccttcaaaaaagaaggttttttatcattactactaattcagataactctttagaagctgcgggttttgataataaaaatgttttttatattcaaggaaaatacaatttattgcaatgttctcagatgtgtcataatcaaagatatcaaaacgatgaattaataatgaagatgacaaaagaacaaaaaaatatgaaagtagactatcaactacttcctcgttgtcctaagtgtgatgcttttttagaagttaacaaaagaattgcatataaaggaatggttgaagataatcaattttttgaagagcaaaaagcttatttatccttcataaatgaagctaaaaataaaaaaactttatttttggaaataggtgtaggatttactactccacagcttattaaataccctttttgactttatacaaaagaaaatccttctagcttgtatgttgtcttaaacaataaaaactacagaatcgataaatccatattaaatcaaactataatttttaatgataatttagatcaaataattcaagacgtagaaacaaaacaaaggagctaaatatgtacttattagaagctattagaaatggtaaaagaattactagtggatcatatgcactagcattacaagtatgagcaatgtctaatttagatattcaagatgatattattgtatttccttatatctgcgatgctcatgtgcaaattggactatttcaaaatccagttgcagaagtaaatttagattacgtaaaagaaaataaaatgttaattgttagaagagatacaggtgggggagctatttttattgatcaaaattcagctaatttttgctttttaatacctaacttacatccatttagttctgttttaaataattatccaaaattttatgaaccaattattcaaatattaaaaacaatggggctaaaaaatgttgaagcaacagggaaaaacgatttaagtgttgatcagaaaaaagtatctggtgctgcaatgaaacaaacagataaatatatttatgctggctattctttactttatgatattgatttcgaaggcgggatgacaaaagctttaaatcctaataagaaaaaaattgaatctaaaggaattaaaagcgttagacaaagagttgcgaaaatcaaagattatttagattctgaatatcaaaatttaaatatctatgaatttaaagacttaattattaaaaattttgaaaaaaactctatttttggtcctattaaaacattaagattaaccaacgaacaatgagctcaagttgatgaattagtaaaaaataaatacgaaaactgagattgaactttcggacaaagccctgaatacgaattttacagagaccaaagatttgatattggaaccttgggaatttcactagaatttacaaatgcaaaaatttctaaagcaaaaattacaggtgattttttcccaatcaaaaacattaagtttattgaagaggctttaattggggctaaacttgaatatgaagatttattaactagacttgaaagtattaaaatagaaacattttttattaaaaaattaactgcaaaagaacttgttgatttaataatgagttaatatgattttttcgagcaaagaatacaaaaaacttttttctcctattaagattaacaactctgttttaaaaaacagatttgttctttctcctatgactttgaatgcatcaactaaaaatggctttattacttataaagacttaaactatgcacaaaaaaggtctatttcagctcccttatcaatcactggtgcagcttatattaataaagaaggtcaactttttgaatttggttttggtgctttttcttttaaacacataaagggtttaacaaaaattgcttcaaaaatgaaggaaaatggttcgaaagctattttacaattagctcattcaggtcgtttttctattattagtttatacaataataattatgttcttggggctagttatgaaaaactgaatttcccttttgaacatgaagtaaaacaaatgagcatttatgatattaagaaagtaattaatgattataaaaaagctactttaatagctattaaagctggatttgatggtgttgaaatttcttctgctcagaaattattagctcaaacatttttttctacatttaccaatcaaagagaagatgaatacggaccacaaagtcttgaaaatcgcgctagaataacatttgaaattctcgaagctgtaaaacaagttattgacaaaaatgcttcaaaagactttatttttggctttagagcaaccgctgaagaaacaagaggcgaagaattaggatacacaattgaagaatttttatgactaattaaaaaaattataaaaaattataatatttcttatttagcacttgctagctggggtcgagatatttacaaaaatagagttcgttctaaaggaaaatactttaatttgcttataaatgaagtagtttataaagctataaaaaataaaatacctttaatagctagcggcggaattaacaccgtagaaaaatgcttagaagctataaaatatgcagatatgattggtctttcttctgtttttgtagctgatccttattttgtagaaaaatttaaaaataagcaaatagataaaattaatttaaatgttgaactcaaagatttaaaaagactcgcaataccaaaagcagcttttaaagatatagtaaaaatgatggactatggacaaagtctacctgaaaatacaagaaataatttaagaaaattagaaaaaaattacaaataattaataaactctttttcctctaaagtaagtttgacttgctttagtttttttaatgtcttttgtgcttacagaaaaaatatcttgatttaatacaacaaaattagctcaataattagtagcaattttacccattttcttttcttgattaatatattgtgcagatttagttgtatacagttcaagagcttgttctaatgtaattctttgttttttatgaaaatgagtaagtgcgctataaatattttttcaaggatttagatcacaaacctttcagtctgttcctaaactaacatttactttattttcatacaaatctttaagtcttactaaaggaagttgagaattttttggatacatattcaaaaaacaaggctgaactgaaacatttataggaaattctgataataaatttaacaattcatcatctataattgttccatgaataattccatttcttaatttattttttttatctgctttaataattgcttttgctactatttttcctgcaatatgagaactagcatgtacaacagtggctaagtttttagaatttacttttaaaattaaagaagataaagaattttcgtctaaaaatacaggagtatcgaatttgtttaaataaaggatttttctatttaatcctccatctgcaaaaagtttaattgcttgaaatttatgattatttttctttatttttaaagtagaaaacgaatttaaaaactcatctctgtatttttggtcagtcattcataattggtgataaatttctaaatttaataaatttttgttatttaactgttcataaatttgaaaatcacgatatcaattttcatttcttaaatcacaagtataaattcctgtaattcctaagccattagctttttttgctcacttaattaataattttttctctttttctaaacttgcatcagaaattaataaatctgttttataaatgattttttcttgtaagtaacctgtaggtcatccattttgatctaattcaataaaactatcttcataagttgcgtttttataaaaaatatttaatctttttaaagtatttgtattagcaagaccactgtgatatgaacgtcttcacaaaaatatagaaatatctggaaaatacttatctaattcttctcgtctaaacatatatttttcttcaaattggtcttcaaatcaatcataaccaattaataaatcatctttttctactttgttttttaataaataatttctaattaagtcaataacttgttgatgatttttcgctttagataaatctaaatatctttcatattttgcagcaaaataaaaatgaatgtgagtatcaataaaacccggaattactacttgattgtttaaatcgacaattttgtcatattttaggtttaaaatctcttcatttgttcctatttttttaaatttttcgttttttatcaaaaaagcttgcttaaatttattgttttttatccatacttttccattaataaaagctgttgtcatttttttcctcatctttttttttttttttgttaaaataattaatttttctttaaaattaatgtaatttttaacacacgagaatattcgttaactttatatattaatttaaattaaatactaaaaaaaggaaaatttttttatttatgaaaaagaaaattattaagagcctggcgacaggttttggtttattagcaccaatagctattttagcatcttgtggtgaaacagaaaaaactactattaattttgcaacttctcaaggcgagttttggccaatgatgatgggaatgaaagaaattattaaaatttacaatgaacaacacaaaaatgatgcagactttcttcctgttgaattacttgcaagagaaaaatctaaacaagattctgaagcaggacttttgagtcagttacaagctgatttaacaacaggtaaaggaaattgagatattattctaggaaacaaagctacagcttatgttgctaattcttttaacaaactattagacgtaggaactcaaactgtaaatccaaattcatttcctaaaaaaattattgataactacaataaattattaggttctgaaggaacaaatactttaaaaagtttaccatacaatataaatgatacagatggtattgttttcaacctagatattatgaatgttctttttgatatcattcaatctaatggtggaacaatagatgaaaattctgaaattgctaaaaaagtaaaagaatcagtaggaaaaggacattcaattcctaaaaattcaatgtttagtgcaataaaaatcaaagaatcttcaaaaacaactggattttcaggatttactgtaaatgattctacatttagcgacatcaaaaaagctttcgaatttgcacaaaaaatttatgacaatacagaaatcgatacaactaaattagatgcagatgtaaaagatacagaaatttttgcaatcgattatgcttctgatgtatttagaaaacaaataatgtcaaaagaaaacaaaagcttctgaactgaagaaagtttaaataataatgacttacaattaaaagtaaacattaaaacagatcaagatttaagaacaaaagtttctaaccaatttgaagaatgagaaaatgctttaaaacaaactcaatttgtaggaactactacaggagaaggtgaagctaaaaaaactcaatggactacaaaagacatagttacaaaaacaacaactgattctgtacaaaacaatgatggaaaaactttttattcagttaaatttactaacttctttactccagaaataaatcaatgaggttcatttgaagtaagacaatatttagctgcatttacttatgctccgttagttggaactaactattctgtagattctccatgagctcgtggtttctttgctgcagacttaaaagatggaaaacaaaaagctgaagaatgaacaactagagatgatgtttatgcaacaaatcaagcaatgagatcagacgaaaatgctcaattttcttcatacaatgcaggtggttcttctttaattgctgtaaaatctaacaatgaaaaagtaaataaaaatattaagaaatttatcgactttttatacaatggaacaggacttaaagatttaactggagctgatatttcagcagctgattttatggcagaacaatccgcttactttattcctactacaactacaattacacaaaataaaattaacgaactcaaaacaagacaatcaacttacaaaactaaattagcagaattagatactcaaattgcttctaaaaaagctgaagcagaacaaattcaagctaaagtagcaaaacacgaaaaagatactacacaacctgatgcaactgaagcagaaaaaacaaaattaaccgactttaacacactaaaaggtaaaagagctaaatttgatatcgctattaataatttaacttcagttattatttctatagattcagcattaaaatttgtaaataatgaaaaaactggaattcttcctcaacctgcaaatacagaaattataaaaattcctacaaatcttacaaatgcattatttgaatcaactaaaaaagataaaccaacacatttaactaaagaagacttcctaacaaaacttttaaataacgttcaaattaactaattttttttagttattatgaataataaaaacaaaataataaagtacttattaccaataagtactttatttttaggaacttctttatttatatcatgtacaaaaacacaagatacacctggtaaaccagaacctgttaaagcagaagaacaaaaactagaacagcaaaaagtagtatttgctacttctcaagcaaaaatttgacctttaatgagagggataactggtttaattgattactataacaaaaactttaaagacactcaaaactttttagaagttgaattaaaaacttctgaagataccaaagcagatactgaagataaaacggctaatacattagattcagatttaagtgctaccggttcaaaatatgatttaattttaggtaataaatcatcagcatatgtagctaattcatataataaattattagatgtctcttcaagtattggaactaatttatttcctgaaaaattagttgaaaatcacaataaaattttaggttctaatgatattacttctttaaaaagtttaccttttgacttaaatgacacagaagctattttctttaatttagatgttatgtctgttttatttgatttaatcaaacaaggtggtggatcaattgatgaaaactcaaatatttacaaacaagttatgcaagctaaaaacaaaggaaattcacttcctgaacatagcttttttaaagcactaaatattaaaaatgaaaatgtattcaaggattttatagtaaatgatgatacttttagtttaattgacaatgcttttgaatttgcacacaaagtatttgatggattaacagttgataatagcaaagtatttgatgatacaacagatgctacaattttttctattgattatacagaaaatgttctttataaagacataatttctaagactggaaaagctttatgagaagaaaaattagtaaaagataaaaatcaaaaagatgagctaaaagttgttaaaaacttagaaagtgatcaacaagttaaaacaagccttctagatacatatcaagaatgaaacaaagcatttaaacaaattcaatttacaaaaaataataataaatgaaattcacatataattgaatctaataatcctcaaaaccagcaaactaataataaccagaagctaaattcaaaaacattttactctgtagatttagacatttcaggagcaattagacaatttaatgcagcatttgtttatatgccaggagtaggtatgaattactctgtaaaatctccttgatctaaatactttgcctcagaaacaaacaaaccttcttcttgagcaactagagatgatgttttggcgatttcccaagctactaaagcaaataaagattcagaatttgaagcttacaaagatggtggttcttctttaattgttattaaatctgataatgatgctaaaaaccaagcagtagtaaaatttttagacttcttatacaaaggtgaaattacaaatcctttaacaaataaaaaagtaagtactaatcaatatataattgaaaaaactggttattttttaccaactaaagaagtaattaaacaagaaacaattgattcattaaaacagacaagaactaattacttaaatgaatttacaaaattagaaaatgatttaaaaaattcttctttagatcaaacagctaaaaaagatcttgaatctaaattagatagctatgatatagcaattaataatttacaatctggaattatttctattgaaagtgctttaaaatttatttctaatgacaaagtaaaattagtaccacaacctgcacataaagatttaggtaaaatgggaaacaccattatcaaccaatttaaagaatcaactaaaaaagataaacctttagttttaccaaaacaagattttttaagcaaattacttgaagatattaaatctatataattaataaattactttatttaataacaaaaaagctaggaacaatttcctagttttttctttatttttcttcatttatgaaggatttttattttatacttcaaaagttttaaatagttttttataatctgattattatgtctttttgcgctaaaagaagatttgtaagctttgatttttgtctttgttggtcaaaagtagttctttgatttatttcaaaagtgctattatatgttctaccacgaattgaataaggtctaaatggttttcttttaataggttggtaagttcttataggttggtaagttcttttataaattggctggcggtttatttgatttatcgatgaagaattactccttgaacgattagcagctactaaaattattataataataacaacgggactagagagccaccacaatcgacttctttttcttggaaattttctattttttatttcttcaagtaaaaactctttttcatcatcaagaaactggatgttttcttcagcaagtttttgttttttttaatttgtttttgcttttcttcagaatcaaaattatcttttttcataactttattttaccttaaaaattagttagaaacaaaactcatttctttttcattttcaaaatcagaatcatattgtaatttaaactgttcaataatgtcatctagtaatgattgtcatttttcttttccaattttattgtcactcaagaatctttttatttctgattttaaatcactttgtggttgttctttttcaaagaaatcaatttgatatttactatttacttctataagaatacctcaaatttttgaagccatatctttaagaaattctttattttcattgctaatatgttctttaaaaatgtcataataagctttttcaagtgttgttaattctaattgtttttcttcttcatcgtcttgttgtgttagatgataaatttgtttaacttcttcaattgttttacgcaatccttcaatgccttgtttgtatttttcaattgtttctattactaactgtgaatagatttcactttttcttttattagttctttttataatgtttattctatgttcaactaatcttcttaactcgtgaaaataaatattagaattttgaacatcgtctatcaaagatattaaattattgtctgaaattatgtttattttgtctgcatttactatattatttgttaaatttaatatgtgtttatcaaaatcttcttgtgttttgatttgggaaatttcttgttttaaactttttttgataaaacctaaaatacttgaaaaataagaataaagaccttttgatttatcgtccaaaacagaataaactaaagaataattttgttttaaaaatgttatattttcaacaaagacttttttaatttcttctttttgactatctaataagtagttagcaaagcttacaattaattccattttaataccatcttcttgactttcaaaatctttgcaattaatctttagattttcggcttcttttcttcattcttctagtatttgttcaaattcaggcagtaatttttctcttacatctgcaggtctagataattctatgtctcttttagaactaaattgagtcatagctttatttaattgcttataaataccgatataatcaactattagacctttttctttgttaggaaagactctatttactctcgctattgcttgcattaaattatgttcaatcattggttttaaaatatacatagtagataaacaaggcacatcaaaacctgttagtcacatatcgacaacaattactatttttaattcagaatcttgttttttaaactcaattgctctttgtttttgatattctttatcattaataactttttttcactcttcaggatttttattatcagaagtcattattaaagctaattttttatcttttcattctggtcttagtgcaataaatttgttatacattttcattgcaatagctcgagaataagcaactatcattgcttttccttttaaagtgtttgcttgtgagttttcataatgttctaaaatatcattaactactgaatctattactttattattagaaaaaatagcttctaaatttgaatgctctttttttaatttattaacagattcaatactgttagaattatacattcgttcaaaatgcttttcaattgtagaaacttgatcatcatttaattgtaaatctaccatttttaaattaaagactatatcagtagttactttatcttcaatggattgagtaatgtcataaatatcgatatatttaccaaaaactgctcgtgtatctttttctttttttgataatggagtaccagtaaagccgatataaaaagcattaggcaatgaagttcttaaaatttgagcaaaacctttttttttctttgtaagtttcttcatttttaatttccatttcatcataaaaaccataatgagatctatgagcttcatctgcaattactattatattttctcttgtagataatgttttagaatcagcttcaaatttttgtatagtgctaaaaaagataccatttactttttgcttaattaatttttcttttaaatcttctctagattccatttgtactggtttttgttgtaaaaattcagaaaaactatcaaaagtagaataaagctgtgagtctaaatcatttctatctgtaattacaactatagtaacattttctaaaatccgtcttactaactttgataaaaacaccataaaaatggatttaccagaaccttgagtatgtcaaactacaccaccttttggtttgtttttatctttattttcatttatgtcttttactctagctagtgcttttttaactcctcaatattgatgataagaagcaattattttagtttcttgatcatctttaaaacaaataaaatttttaataatatctaataaaatttctttttgaaaaataccttcaaaaaagacttctcaatttatttcttttttacttaaatattctttaccatcttttgtttttcaggatttgaaatgttcaaaagaagatgtaattgttccgattttagattcagataaatcagaaataactaagaaggtgttatatataaatactgaagaaatgtcatacatgtaatttcttaattgtttatatgcatcttcaattgtagtatttggatcaataggattttttagttccataactacaatcggaatatgatttaatcaaactattaaatcaggtatttttttatctttatttttttcttgaaaagaatcttgctgagaaatttcaaaaatgttattttctatattttcaaaatcaactaatttaatagttttgcctttttgttcattattttgtttgtagcttacagttattccattttgcaatcagttagtaaattttaaatttggctttaaatctgaaggattttcttgttgcaaacttattaatgttttaattgcttgcttaattgcttgatcatcggcgtctttgttaataattttgagttgctcaaataataattcttcctttagaaaagatttattaataaatttttcggtttgtttttgtctgtgttttaaagtatcaataaatttttaaactatttcattttcataagctttttcatttaacatttttgccttctttttatacacttttatacttttatttttgataaatcaagctcattatttaataatttagtaattaatttgtctcttagtttttcaagttttttgttttctaaaagtaaagtatttaaattttcaaacattgcttttgttaagttatgatagttttctattatgcttttaggtggaacgattagagggatgttgttgaaatcgtcttgaataactcgttgttgggcggatccgtgacttagattgctttttatttgttcaaacaaagggaataaaatataacttgctatatattcaaaagtggtttgagtacattttaagcctgcaaaatctgtagaaaataaactattttcaaccaagtactttaatgcattatttaataaaatatgttttgaactatctttcagtgttgaaaatcaaactgaatacaaaataggttgcttacttgatctaccaggtattgttaaagaagaaactaatcttccattttttatatttatatgttgaacatcagcagttgcaaaatattccttatccccttcaaatttatttattcttgcattaataacactacataaatcattatgtagtaatgattgtttttttcatccttgtgttttaatattttgctctatatcaacatcaacaaaatagcgacgatatagtgttaatatttgaaattttaaattttctattattttttcattagtttcaattttattatctagtgaatctgttatctttattattttgtcttggatttcaaaaggagggatggagactttgagaagagataattcactgaaattaaatcaaggtagagtagttgatcttgttattgcttctgaatgaatatgttctatgatattttcattcctcaaaatattgtataaaaatttagattttacaattttttcgttagtagataaaattaaaaagctatctgcaatgacataagaatattttgactttggaactgattttacatacataaaatgtttataaataggagcaacttttgaatatatgattgttccaacttctaaaatatatttaaagtgagggtttgcactttttcaaagtgaaggcgcatgattttgaattttttcttttgaaatatcttttgtgtttaataaaattgcatattctttattttttgtatacttattttttgtatctcaacacaactcaccaattttgtactcttttcattcaaaattattcttcattttcatcttctaaaccaaatcctaaattagctaagttattaactatttcttctgaatacattttagaatcttgaaaaagttgtataagttctgagcttaaacttttcatttttgtggcaaattcttctgcaggttctgaatcaaaattaacttcaacatatcttccagttgttaaattgtaattattttcttttatttcatttaacaaaactactgctgaaaatcctttttcattttctaattcaccatttgcatattttttatatgtagatactattttgttaatatcatcttttgataattctctatgtttagtagataccatatgacctaatttagttgcattaataaataaaaatttatctttattttttttctttttgttaaaaactcaaacaactactggtaatgaaacattataaaaaagctgagtaggaaaagagataatagcctctaagatattatcttcaattattttttttctaatttctgtttctgttttatcaaatgaagaaacagaattatttgataaaactaaagcaatttttcctcttggtgataggtgagaaatcatatgttgcattcaagcaaaattggcatttgattttgaaggaataccatattgtcatctaggatcttcacttaaagattcgtttcatcaatttttttgattaaatggcggatttgcaaagataaaatcaaatttttcatctttaaaatgatcatttgtaaaagttgatgcaggggagtctccgaaatttgcctcaattcctctaattgccatatttattttggcaattcttcaagtatcaggttcagattcttgaccaaaaaatgaaatttgagttgttttttcgtgtcgttcttctaaatattttattgactgaacaaacattcccccactaccacaagcaggatcataaattcttgatttagcaacaggatctaaaatggcaacaattgtatcaactattgatttaggagtatagaattcccccccccgctttcagcgaaatgggataaacaatattcgtatgctcttccaagaatatctcttgatttttctacttcatcaaagtgaatttcatttataaaaatgtcaattatatctcctaatgcagtagggtttaattcacttgaaacatatttttttggtagtgtgttttccaatattttattattttgttcaatgttttccattgcttgatctaaaaattctgctatatttgcctctctactacgttttgcaatttctgatcaaatataatcttttgacataaaaaaagcagaaatttttttgtactcatctgcatcgtcttcaagacctttaccttctgcaactagttcttgatatcttttttcaaaaacaaaagatgcatattttaaaaagattaaaccaagcaaaatatctgcatatttggctgttaatgtacttccttgtcctcttaatgtatttgcagcttttcacaatttttcttcaaaaccgagattattggaattgattttatttaatttttctttttcttttgccattttattcctttaatataaacattttaatatctttaatttataactttgtattatagcaaaaaatgcatattatttgtaagttaactatttttactactttctaaattcaataacttcattaaaatgtttatattctgaagctttaatatgatgagaaatatagattaaggttaaatttttatcattaaataaataattttttattttttctaaattctttttatctatatttaatagagcttcatcaattattaaaaaaggcttggcatcatataaaattcttgctacttgaattctttgtttttgatttaaagaaattaataaatttcagttattggttaagtattgagattcttctaaaacttctaaatttaaaaatttaattatttgttttaatttgtctctgttttgaaattcatcttcttctaaactaatgtttttgtacaaatcaccttcaattaaacaggttgctgaattttttttacttatgaaattaatttgagaatttatacttttaaaatctattgtttttaaatcatattggttgtttaaaattatttgaccttgataatctttttctagtcctaataatatttttgctaatgtagattttccacttccgttttttcctacaattaaatattttttattttgttgtattttgaaatttagctttgaaattaaaggatttttatcataactaaaagttaaatttttaatatcaatactaaataatttttttggtagtgggattaaattctcttctatttttaagccaaaaggtatgtcatttaaatgttctttttgatgctttcttacttggtgaaatttaatcatattactaaaaaaatgatttatttgttcaaaaaatttatctaataaaacatttgacaaaacaattatcgacactgaaaaaacaattatatttatgtgattgtaataaatataaataaaaattaaaataataaaaacattaactaaagttttaaatattcttgcagtattagaagaaatccaaaaagaaatatttctcatttttatgtaatttttatatgcttctattttgtttttaatattggatttgaaaatcttatttacttcatcttttttgtttaataacattaaacttggtagataagagattatttgatttgatttttcataaaaggaattggttgactttactttatttttataggatttttctagtttttctttaaacaataaaggaaaaatcgaaaatattaaaaaagatatcaatagagttaaaccaataattcaattaaatataagagcaaaaattaaaatcgaagctatatataaagtatgtttaattatttctaatagtgaattgtaatacttagtaattctttcatcattgttatttttaatttctgaatagtaaaagccttcgccttttttcttatattcagttaaatttactttgttaaaataagttgacattttttctaaatttttatgttttaaaatggctgtaaaccctgtaaacatagaacgattaaaagtatttaccacaacaaaaactaatgaagaaacaaaataaattactaatcaaagaattaaataatttaaagatttttgattaattgcattaaaaatgtaaaatggagaaattgtgattaaaaaagaatttaaaataaattgcaaaacataaaatatatttcaagcataaaatcaagataacttcttttttagtatcatctctttaaatttctttttcatttctaatttattatactttatttttgatatcttttagtttactaaattaagcaaaataaaaagttcataatttcttatgaacttttaaaatttattatcttcgaagtgaaactcttagccctgagttttgtctttcaacttcttctcttacttgtcttttgacttcttctattattctttcaagctcagaatcaaaatatgtttttcctttgtcataacccattaaagctgcaccaactataaacaatgctattgaaatcactaaagtgataatagcagataaaataagaaagtttatcaaaataaatctaattccattttgttttttagcataaattctaatggaaaaagctattaaaaacacactaacaagtaagattataaatcctccggcaaaaaaagcataaggagaaagtttaatatttgttaattccataataacctccttttgtaattaatatagcttataaattttatacaaaatttaatttttccaaatgtttttcaaaagtattttgaaacttaaatttatttaggaagtataaaaaataaaaaatccttcaaaaaaatgaaggatttttcaaaataatttactttttaactttgaggtgattgaggattaagttgttttgaaagttcctcttgctgtttttgtaattgttctcttaattttttaagttcttctgcattttttcttcttacttcttctaaatcttttttatttttaatttcttgttttattctttcttgaatttttggcaagaaataatcttcatttctttttttatctcatgtatttgttaatacatcaattttagattgtaaagcttgttcttttgaagtttcttcagtttttttgataagttcagaattagaaatttcttcatataaaaagactttttgttctaattcttctagtttttttatgttttctgcattaagcggaagtttttgttgttcagttaataatgtttctaattctgtttgtttttttaaaaaattttctttatcgttattaaatgaatcttgtagtcttgcaacttcaacttgtttttcaaaatcactcattattttatctttttgtgtttgtgaaagagaagataatgtatcttgtgctttttcaaaagaagttttttcagctggaggttgcactgcgggaggatttttagttgaagtatcagaagtatttgttgtttcattttttactacaacttcttgtctatttgtaagagaaacaactacgatagctgcagttaaaacaggaaccaataaaattgctaaaactgctactatatcttttacacttttgtttttaaatgccattttaattttaataaccttgtgtttcctaatttgtattgttaatataaagctatttttacttgatatcgaagtggtgatttatatttataattataaattctgcgctttaaaaagtattatttttaagcataaatttagtaaaaatttttatatttaacaattaaattatatatatatatatattgcaagcttttatgaaaatttattacaaaatatagtaaaaaatccttcaaaaatgaaggatttttagtacttaaataaaataataacttatttagaaggagtttttaaaatatcagctaaagaaggaaggctaccaccttgtaaaaattgttgtcttaacttttctaagtctggatttgattttttgagtttttcaagttctgcttttctttgtttttcaagttctgcttgtagttttaaatcatttactttttgtttaatagcatcttgaattcttttttgttcttggatatgatatttaatatcatctcttgtatgatttgttttatcttcttctattgaagtttcaagttttttaatatcagattcattttgaactccttcataacgtagaagttcaacttcaagtttatttaacatgattttgtcttcaggagtcattgaacttgctttttgtaatgattgaatttgtgattctattttactttgttctgctttaaatttagcaggatcacttgtaaataattgttgtaatttagcaatttctactttttgttcaaaatctgaaattaaattttgcttcattttctcatctaattgtgaaaattctttttgtacttgtttaaattcaatatcttgttttagattattgttaatctggtctaaagatgaactaactttattttgatctgaattagtttcttttaatgtagttgcaaattctggtttttcaagtaattccatacttaaaagttttagagttaattcttttaattttgttttttcttcatcagttagactttctttttcttctaaaacttttaattcattttccaatttagttttttgagcatttcatttagttttattagaaaataatagatttagtttaacatcttctacagaaggaaaatctttctctggtgttggggtttgctcaggttttaaatcttcttgtttttgttcttttattagtacttgttgtttttgtgtcaaagaaactgttacgatagcagcagttaaaacaggaatagataataaagctaacgtagctgcaaggtctttaacagtcatttttttgaaaatcatttttttataatatacctcgaataaataaatgataattttgataattcacgaaaacaaaactcatagataaataaaatattttatttttaaaatcaataattaaatgtttcgaaatttaccaaataccttgaattttgtagtcaaattaagatttaaatttattaaacacattagtgtttaacataattattatatatatatatatattgcaagcttttgtgaaaatttattacaaaatatagtaaaaatccttcaaaaatgaaggatttttagtgtttatagcactatttcttcatcaaataagtctttgactttatcatcaatatgattacttattgctattatggtatttttattattttttaaaatatcatatcaaatctcataactaaatttagtttcaatgttatcaagaacttgatctagacatcaaatatcgaagttggtgtattttaatcttgctaaagaaattctttgtttttctccgtctgaaagtttgctataggctatattatcttctaatgatatatggtctattttaaactcttttaataaattttttactaaatcaatatttggatttttatctcatataactatgttatttaataaagtatcattgtaaatagtgctattgctttcaagcattccaatttgttctctgaagtaattaacatctaacaaatttgcttcatattgtttatttattacaacatttccttcatattttctataaactccagctaagatatttaaaactgcagattttcttttttctgatactccactaagtaaatattttttacctttttcgattttaaaagatttgtttgtaaaaacatatttatctgattctaaaagtttatagctaacgtttttaaattctatagtctctattaattgtttaggtttaaacctgatgttgttagaattaggtttgttaaatattttatccaaagtaggagcatataaaaatataggaagtaaagaattaaataaaaatgataaagaagtagaaaaaagaagtaaataagaaaatagagaaagaaaagaatcaagctcaattaaattgtagtaaattaaaaatgaaatctctcctactcctaaagttaaaaatgctacattaataaatttaaagactcaaataatagaatctgttttaaaatccaataaaaactcttgtttatgaagcatatttgctcttgagtttatagttttttgaaataaagaaattttattaaaaaagtaaaatacataaaataatgaaaatgccttgatttgtttttgaccatattgttcatacaaattcatcatttgtgtagctctttcttgcataataggttttaaagctaaaatcaagagtaataaaatgacattagctataatgatagttagcaaaataattcaagagtataacgaaattacaaacataaatattaacggtataacagaatagctaacaaatttaaaaatatgctcatgaaagagttctaaaattaaaattgcattattagaatattcgtttaaaaatgaaatagttttatttttattttgataaatgttataaacagtatcttgtgttaaattatgaactattttttcttgaatttgttggtatgttctagcttgagtggctaatttaaatttgttaaaaaatcaactgatgagaacataaaataacattgataaaacattaatagataatcaagtatataaaactgaattaaatgaagtagagttgctaaaatattcaataataaatttataagagagcgtgtgtagagaaagtaaaacagtaagtaaattttgaaataaaaaaactattaaatttctaaatttttctaattttaaaatctgaaataccatttattttccttcttttttctttctttttatattatttttttgcattttctttttttaattttttatattttaaagaagcttttaaaaaggcatcaaataatggatgtggttttaaaggtctagctagaaattctggatgatattgaactcctaaataaaaaatgtgttttggatcttcacaagcttcgattagttcagattgtggatgttttgctgaaaaaataaatctttcatcttctaaaacaggaacaaattctttaactacttcatatctatgacgatgtctttctgtggttttgcttgttttgtatattttttcaattaaagaatcttttttaaattcaacttcagaagcacctaatctaagagtaccacctaattgtagtttgtctccatctttaatattaaaatctaaaacatatacttcatctttttctgttgcaaactctttagaatttgcattgataatccctttgtgtcttgcttgagcaacagtcatagcttgcattcctaaacaaataccaaaagtaggaatattattttcttttgtgaaagcagctgcttttactttgttttcaaagccacgtttaccaaatcctggcaggataacaactccgtctgcttcttttaatgtttctaaattcattgattcttttttatcagaagtagtagtatctaaaaattttagttcaatatctgttttattatatactcctgaaattcttaaagcttcaacgatagatttataagcatcaacaaattctgtatattttcctaacatcattatttttaaagtttcttcttttttagaattatataactcttcaaattgtttccactttgttaaatcagccggtttttgttctaatttaaagtaatctaaaatagactgaacaacgtgtttttcttcgaaatataaaggaatttcatagacatttttaagatctggtatagaaaccacatttttgataggtaacaatgaagcttttgctactttcattgcggtttctttatttagttctttgtgagttcttaaaaaaatcatgtttggacgaatacccatagcatgtaatttagatacagaaaattgtgtaggctttgttttgaagtcttttgatgtttctaagaaaggaacataagttaaatgtacataataagaattttcaaaatcgctttcataacccatttgtgaaattgcatataaaaataagttagattcaatatcaccaacagttccacctatttctactaaaacaaagtcagtgttgtattttttttctatattttttaagatgtttataatttcatcactaacgtgtgggatatactgcaaagtctttccgttgtatagtccttttctttctttttcaaggatttttgaaataatttttccacttgtaaagttagaatctttggaaagattttcatctgtaaatctttcataatgacccaaatctaggtcagtttctcctccatcttcagtaacataaacctctccatgttcgtaaggagataaaactccaggatctacatttaaataaggatctaatttgattatgaagacagaatatccacgatattttagtaaattacctaaagaagaaacaacaattccttttccaatacctgataaaacaccaccggttacaaaaataaacttagacataatttcctttatattctttaatgataatacaatttttaatatattttaaaataaaaaaaacaaaaaaataagagtatgagctcttatttttaaaagggataaataattacacttctaatttaattttaatagaaggtcccattgaagcagacacagtaaggtttttaatatatgtaccttttactacgcttggttttaattttttaattaaattaattaatgtttgagcattttcagtcaatgctgtggtttccatagaaacttttccaattaaagagtgaacaattccgtatttatcagctctataatttgctttaccttttttaagttctaaaacagctttatcaggagttggggtaacagttcctgtttttggattaggcattaaaccttttggtcctaattttttaccatattttcctaaaactggcattaatttaggctcaactactataacatcgaagttaaactgatcgatttttaaagcatgttctaattcttgagttgtataaactaaatcagcacctgctgcttttgctttttcagctacttctgttgaatctgtagccactaatactctaattgattttcctgttccgtgaggtaaaacaacacttcctctcaattgttgatcggcttttcttgtatctagatttaatctaaaagctaaatctactgaaccatcaaattttgtataagaggtttttttaacaagttccatcgcttcttctaaagtataaaattttgttttatctactaatttgtttacttcagctaatttttttcctatttttttcattatttagcctctttctgttgttttacaaattcttctcaaccttcaacttcaacacccatttgttttgctgttccataaattgtaaacatagctttttcaagactttttgtatttaaatctactaatttgtattgtgcaatttcttttaattgttctaaagttatttttgcaactttggttgtttttgaatttgaagaacctgattcaattttagctagttgcttgattttgtaagaagcaggtgaagtaaatagtttaaaatcaaaacttttgtctttataaattgtaattgcaactggaactggttcgctacctctgtctcttgttgcgtcattgaattgtcttgtaaattctggcataacaatacctaatccagctaaagcaggacctggttttgcttgaccagcgttaaattgtaatttagcaattctaactatttctttttttgccatttcgagcatcctttcataagttctcttggtggtactatcgaattttttcttccactagaggcaataaatgcttttaaataataccacaaacttacaaaattgataaaaaaaataaattaatttcatatagttgttagtgtttttcaaataggcttgtttgtagtataattttatttaattaaatttagagaaaaacaacatttttggagtttaaaatgaacataaagcaattattaaaaactgctaaaaaacacaacgaacaaactgtcgaaattaaaggttgagttaccaacttaagaggtaatgccaaaattaaatttttagaaattaatgatggaacaacactagaaaatttacagttagtttttaaaaatgataaggaatttatagacaaaattgaaacattgagtttaggagctgcgattcaagtaaaaggggtttttgtacatacaccagaagcaaaacaaaaaggtgaactcattggttcaaaacttgaaattttagctcactcagattctgattttcctatacaaaatcaagaaatgtctactgagtacttaagaagtattcctcacataagacacagaaccaaattatttagagctgtgatgagaattagatcaactcttgcttttgaaattcatgaatattttagaaaacatgattttctttatctttcttcacctattattacttctaacgatggagaaggagcaggtgaagcttttgttgttgataatgaagaaaaagacttctttaacaaaaaagcaactttaggtgtaactggacaattacatgcagaatcttatgctcttggatttcaaaaagtttatacttttgcgccaacatttagagctgaaaaatcaaacacaaaaaaacacgctgctgaattttggatgattgaacctgaagtttctttttacaaactaaaagatattattaacctaggagattctcttctaaaaactgtaattaaaaacactattaaaaaacatcctgtggaattcgaatatttccaaaaaaatattgataaaaacttagtaaaaaaattaaaacaattttataacaacaaattaactactttagaatacagacaagctattgaaattttgaagaaaaataaagcaaaatttgaaaaccaagatatagaatttggtactgatctaaaaactgaacatgaaagatttttagctgaagaagtagtaaaaggtcctgttgcgattataaactatccaaaggatattaaagccttttatatgcaccaaaacgaagatggacaaacagtagctgcatttgacttacttgtgccaggtattggtgaattaataggtggatcacaaagagaagtaagatacaaaaaattacttcaaagattaaaagaattaaatatggagcaagaagacttgcaatgatatttagatcttagaaaattcggaaatttttcttctgctggatttggtttaggatttgaacgtttaattatgtatgtaactggtattgaaaacataagagactcaattcctttcccaagaacaaacaaaaatttaatgatgtaatttatgatgctttccattcttttacctatttataacaaaagcgaaaatttagaacttattttaaataaatttttaaatcaaactaataaagattttgaacttattttaagtctaaattctccttcagaaaaacaactaaatattgtccaaaatactataaaatccttcaaaaataaagtaattgttgtaataaatgataaaaataaaattctttctgaagaaatcattgatatggtaaatatttcttctggtgaatactttatttattgttcagagtttttagattttgaagcaaattttgtcgaaatattcttaaagtacaaacaaaaatttaatactgatgttattgaatttactcctaaattagaatcttatttttcttgatcacctaaaaacaggattaagaaaaataaagtttttaaatcagaagaattatctaaagtaattgcttattcttttcctttgttttttaataaattctttaaaaaagaagtatttttaaatatttcaaaaaacataagcatcaaaaccaataactctaaatttttactaaatttagtttacaaaatgttattaaacattgactcatatgtttttttagatcaaaagttttttgttgttaaagatgtttatattgagaaaattagtttttatactttaaacagaaattgaagcgaaatttttgaatatatgcttcaaaatagaagaaactttactaacgaaattctatatgcaaagatgtatttttttgaattatttatccctagcctatttggacttcataaacaaagattattcaaaaaaattaaaaaaattctttgaaaagaatctcaaattgatttacttattgaaaagtatgctaaatttttaaaaaaattacgtgatattgaatttaacaaaagcacaaataattatttatttgaaaacacagaagaagctgagttaataaaattaaatttaaacaaggataaatgaaaagaaattcataaaaaactataatgcaaacagataataaaatagcaaatttttgaatcaggtttttaagcggtattatcgacttaattactattttcatttttattattgctatctcatttgctgttttcacaacagataatgtgaaagaagaactaattacttgaaaatattatctgtggtattttttagttattgttttaatttttttattaaaaattattattcctatttttaaccacaatcaaagtataggtcaaaaattgtgcaaaatcaaggttgtttttcttgaacctccaataacttttaaacaaaaaataatttcacaaattaaaaaagaagcatttacttcattaaactgaattgtattatttttgatatctgcttgttgtttgattcctcaagtagctgaaaaattaataaaatcaaataactcaaatgtacaaattaaacttactgactcagattactgaaactggtgagaacaattcttgatatccatacctattttattttcaaatattaataccctaattagctttgttttaataatctccatagcaagaaaatctaaagttggattaaatgatttatattctaaatcaagaacagtttgaaaatacaaaaaagaaaaaaaagaagatcaaataatctacaaaattgaacctgaaaaaattatctttaaaaaacttatatgaatggaaagtgaaaaaaatgaaatcagataaatattctcaattaaaaaatgacattcttgttggtctaaatactaatcaaaaagcggctgtgcttgaaaactcgcaacatctgaggattatagcaggtgcaggaactggtaaaacgagtgttttaactaaaaaaattgcgtatttaattgcttctaaaaagacaatttcaaaaagaattttagctcttaccttcacaaacaaagcagctaacgaaatgaaagaaagagttaaaaatctaataggtttagaagctaatgaaaccaaaatttttactttccactcattgtgtaatttaattttaaaaatagaagctaaagaatttcagaagataaaagactttgaaaatttagacaaaaacttcaatattattgatgacaaagatcaaaaaaagattttaaaagatgtctatgaaaagcttcaatattctttaacaaatgaagaaattcctaactttagaaaagcaatagattttataagttatgtaaaaaataaagagctaacttttgaacaaattagttctagtgctcaaaactctacagaaaaaaaattagtaaaaatttacaaaaattatactttttatatgaataaagctaatgttgtagattttgatgatttacaaatttttgtaaaaacattatttttaaaaatacctgaagtagctaaaaaatgatcttctttttttgactatattttagtagatgaattccaagatacatcttcaattcaatatgaaatcgtaaaacttttagtatctaaaaaaacaaaattaattgtcgtgggagatccagatcaaaccatttattcgtgaagaggggctgatgttaatttaattttaaatcttgaaaaagattttcctaagttaatctctattacattggataaaaattacagatctcatcaaataattttagatgctgcaaattcactaatcgcaaataacaaaaacaggattaaaaagaatttaatttctagtaaagaaacagaaggaattgaaataaaatttttcgatgcttcaaatcaagctatggaattttcttgaataatcagcgaaataaatgatctaaaaaagaacaaagtacaacttaaaaacatcgcaattttatacagacaacatttttatgcaaaacatctagaagatgaactttttaaagaaaatataccttataaaatagtaggaaatacttcatttaattccaaaaaagaaataagagatgctattaactttttaagagtaataaatgatggtaatgttgttgcatttagtcaaataattaatattccttctaaaaaaattggtccaactattttgaataaattaaactcattagctgaagcatctaataaaaatttatttgactttttaatggatttttatagtaaaaattcaaaatctaagcgagaacaagaaataaaaataccacttgctaaagaaaatcaaaaaaaactaattgcacttttatcttacataaaagcatttcgtcctttatttgaagaaaaagaacaaaaatttgatattttattaaagaattttttagaaaaaattgattattttagtgcttataaacacgagactggagagaaaaaagaagctcaagaagtactagaaaaattctatgcatcattacgaatttggcaaaaacataatacaaacaaaacattaagagaatatttagacgatagcgtgttatcttcagatcttgataatgactatgaaacaaatacttcaatttccttaatgacaattcatgcagctaaaggacttgagtttcaaaatgtgtttttaattggtatgtcagaaggaatttttcctactaaaaaaactttagaaagctatgataatgatttgcttgaagaagaaagaagattagcttttgtagctgttacaagggctaaagaaagactttttatttcatattcaagatcgaattttctttctgctagcaaaataaacaactataaatcaactccaattagtacttttgtttctgaaatgaagctaaaatctgaacaaattttaagttttagtagaattacagctaaaggtgatttaaattacacaaagagtgaaagcacaactttttatcaaggagatttagttaatcacattaaattcggacaaggaattgttttaaatgttgaaagcgaaacaattgatgtagaattttttaacttagaaagtaatcaaaaaattagaactatattaaaaaatcataaatctattgaaaaaattgaaaaatcataggctaaaatatgtccacagaatgaatatatgtaataatagttgttttcatcttagttattgttgtattattgcttctttccttgtatttttttaagaaaattcaaactaattctttcttcttaattccttttgtttatgatgaaaaaaaagcaagaatcaagataaaagatgcatattttttagagtattcgaaatttctttcaaaaaacggtccattaatttttggtgactgagttttgtttagtgattttataaaattattcggaagtaaaaacactcaaactttaaaagaagcgttttcaaaatgaaataattttaatacaagcttttctcttgaattttcacaaaaacacgataaaactaatcaatcacaaaactataaattacattttgaagatacaactaatgaagaaaataaagagaaaaattttattttaacttctattatccaaaacaatatttttgattatttttttatcaaaaagtttaaacaaaacaagcaaaaaaatatgattaaaaatgattttgtatttgactctaacactaaaaacaatattgtttttttaaactttaaacttaaaaagaatttaacacaacaagaagaaaaagaagcactttttgaacaaatttactgacctaatatctttatattaaaaaatttaaaatgcttgatatttaaaaaagatattcttactttacaacttgagttttctgctaaaaagtcatttcaaaaatatattaaaaagctttttgctttatttttgaagaataaatacaaatttttttacaattatatttcagcatttgttgctaaaagtcgcgaagatttaaagtatttaaacactaaaattaattattcttttcaagaaatagaaaaaagttcaaaaaatactttatttttagatatgaaagagtttcaacaaaaacttcaagacaatgatttttctttattagagcatcaaaatgaagaaaaaatgctactaaattttgaaaaaataaaaataaataattttaatacttataaaaatttagaacacaaagttgttgatcaaaaaatttatacattttcatattcagattctaaagtaaccaaatttgaaaaagaacttcttacttataattcttacttagaacaattccatcatgaagaaaatccatatattttacttcttgatcagcaaatgtttatttatcttcttaataaagtaaaaatcaatccaaaattaaaatatttaatcaatgttgaagactttacaaacttaaaacaatttattttagaatatagaaatcaaaaacatgaactatctgaaaatctaaatattggttttgtcttaaatgaaatagattctattgattttttaaatatttctattttaaaacctatatttatctttttaaataaagaaaaatttaaacaacttgataattctaaaattaatattcttgtagaatccttatttatttttttaaaaaagaaaaaagttaatttatattgtggactacccactaaagaatttgaaaaatattatgaaaaaatagggattaattacttttattagtttataataattaatagcacaaaggagaaatacaatagcttaaaaattgtttacattatgaaaaaattagcatttattatagattcgttttctggtatttcacaagatattatcgaccagactgatgacgttgaacttctacctctaaaatttattctagacgggcaggaatatttagataatcaaaaaacttttaaaggtgaagacttatttttgaagataaaacaagctaaggaatttaaaacttctatgccttctattgggctaatggaaaacgtgattgcaaagcttgaaaaagaatatgagaatataattgttcttcttattccttcatatttatcttctactttttcaacttttcattcactaatcaaagacaatccaaaatttcatttaattgataatcacttttgtggtgatgaatatttagatatagcaaattttgctttaaaagaattgaaagaatactcaactgaatttatcattaatttcattaaagacttaaatgaaaactctttaaactatgttattccttctgatttaaatcattttgctaaaggtggtagattagtttctatcaagaaaatgataatcaacacaattaatagtttttcaatcattttaaaaataacagataaagaaattgcatttgcaggaattaaaagaactctaaaaggtgcagttaaaaaagtggcttcaaaattgaaggaatttgctcaaaaaaactctcttgaaaattatatttttaaacttatatattcaggtaatgaagttttactaaatgatgtaattgaagctcttaagcaagaggatatcagtgttgaaaaagtacagtttgcttctgctattgtagcaactcatacaggttatggtgcattttcaattggagtttttccaaacttagataaatgattaacaaaagcttaattttgattttatagatataaaaacacatcatctcgatgtgtttttattattttatgaattaactttttgttcatgctttcctatctttttcctttttttgaaataattacgaatttttttgaataattagtgaacgacaaaaaacaaaaaggagattaatatggaaatttataaatttggaaaaatagtttccaaaagtaaaaattatttaattttagaacaaaactatgtaggtcatttaatttatgtacctaacatagaaagatttgaaaaagatgaaagcaaaaaagtttatgtttataactatgaaaatgaatattctaaaacaacatatggatttgaaaattttagggaaagaattttatttgaagatctaatttctgttcaaggaattggtccaaaaactgctattgcaatactaaatcaaggatgagaaaatgcaatgtcatatatagctgatggagattgaaagaaaataagtgagtttccttatttaaatttaaaaaatgctaaacaaattgtttttgaatttcaaaacaagtacataaaaatatttcaaaactaccagaaaaacttgaacaaagataaaccaattaacaatgaagaggaactcacatttaattcaaaaactgttttagaagacaaaatcgcaaaagaacttgaagatactttaaaaattcttggatttcaaaagaaacaaattaattatgcactttctaaagttcaagcaaacagcgactttgaacttttagtagaagaagcaattaagttgatttcaaatgcaagagaatttagaaattagaccaaaaaactttgaacaatttattggacaacaaaaattaatcgagacactaaaagttttaatttcttcttcaaaaaaaagaaaaaaacctctagaccatattcttttctatggttcacctggaacaggaaaaactactttagcaaacatattagctaatgaaacacaatcaaaaataaagtatattcaaggtcctttgttagagaagaaatctgatattttgtcaatgttagcaaatgtcgaaaaagggcatattattttcatcgatgaaattcattccattaacaaaaacatagaagaattgctttattcagcaatggaagaatttgttattgatattcaaattggtgttgaaggtgaaagtaaaattatgagaatgaaattgcctgaatttacacttgttggagcttcaactaaaatttcgtctatttctttacctttaaaaaacagatttggtcttactgctaaaatttatgaatacactggacaagaaatgaaacaaattattaaaaattcttctaatattttaggaatagaaattgcttctgaacttattgattatatggtagattttacaaataaaactccgagaattgctaataatttgttaaagagaattcgtgattttgcaattgtagaagatacaaaacaagtttcaaaagacataatagataaaacttttaatggaataggaatttttttaaatggcttaaacttacaaaatattgaatatttaaatttattagctaatgtttttaaaagaaaaactgtttcattagatgttatttgtggtattttaaaagaaaccaaagataatatcatcaacaatatagaacctattttattacagcttgaactcatagaaaaaacttcaagaggaagaagaattactcaaaaaggacttgattacttaattgatgtaaaaaaataaagcaacaaagttgctttatttttcttcttttttgaaggattttagctttctaatttatagttagaaatttgactatatacttttttgtcttttttaaatatttcaaattcactagcagaagatgttcataaattaagtggtaatttaaatgaattaatacgttttgcttcttttatgtatatttttgttcaaggatgtaagtatttgcaaatttttaagattcttgatttttctattttagtaagttgtgttttagttcagaatagaaaacctaaattgtaattgtgatttaaatcatagagtttttgaagagattcgaagttaaaagaagaaaaaataattttttctactagctttgaatcatactttttcattaacttatcaatttgattttcaatgcctttatattctttttgatctgttttgatttcaatattaacaacagaaaatttttctaaataaaggtctaaaaattcttctaaagaaagaattttttgtctttgtgttttaagtttaaaaaaggctgctacgtcttcttgctcaagttcagaaaaagttgaatctgatatctctttgcttcttaatgaagttctttttgtattttcatcatgaattataactagttgtttgtctttggttaaatgaacatctaattcaacaccatcaaagcaaaattcatatgctaaatcaaaagctaattttgtattttcaggagcaatagctgaaaaacctctgtgtgctaaaagtaattgtttatttttaagcattatctaattcccttcatctgtagttagttttacctaattttttcatttcaattgtatttgcaataaagactactaaagcacataaaactccaactaaagtaattgctaatgtaatagccaatattatttgatatccttctacacttgtatttgattgaccttcttttgtatagctttttcctacagctcctgtaatttcgtacaatcaagcatctgttgaaaaacctataaaagataaaattcctattgaagaagcgtagttgttttttcctatttcaatttctccaacttgtgaatatcttaatgtcaccattgctcaagataaaacaccaattaataaaaataaaattgaagataatacaacaactaccgttgcataatcttgactaataaatgcaagtaaaataatgaataaaacaagcactaaacctataactgagacaaaaattaaaaatagaatgtagcttttaaatttgtcagctaaatatccgatgtatgaacttacagcaaatcttagtgcataggttctaactcctcctaagactgttactaaaataacaggtgctaagaaagcattttgtagcatttgtaataaataataagcaaaaactgactggaatgtgtacatccccattacaaaaaatgaaagcattcaaagttttcaattttttagtgattgtcacacttggaaaattgtttttttaaatttttctcagctaatttcacttatatttgatttgtctaaaggtttttctggtactaaaaatagaactaaaaaagaagtaattactaaaaatgaagcgattaaaaaagcgtaaactgaaaatggagttgttgaattattttctgctggattactatatcaaactgaagtgataatcaagcctattaaaaagacaaaaatgaatccaattattccgttagctgttccttgaattccatatgctaatccttgattttcctttgtactttgttgagaaactagttttcaaagtggtgttcaaaaaattaaagttgaacttattcctcaaagaccaaatactatagaatactgtaccattgcagcttcacgcccaagttctttgttggttaaaattattgaaccaaaccagaacgtcaaaatacctgttgataatatagctaaaaataaaagttttcgcgaactgaatctatttgctaaaaaaccaccaggtaattgagttgctaatgtaactcaaccaattattgctgttaatctagcaacatcgtcttcgttaattcctaaataaaggtgtaaatttggaactatatttttaatgtaataaggagcagcaataacaaaaacgtctgctgcagctagtattattaaagctaaaatttgttgtcatgtaaaagattttaatttttctaaaattttaattttcataagtactacttaaagttttgtttatatataaacataaaaaatttatatataatttaattttacttcaaatttacttttaaatttatatttttagaactaattgaataaaagaccaaaccattaacatagcaagaacgtcgttttgacaatatttttgtaaattttttttgactttttgtcaaacatgttctccggttttgtttaaatatcttaatgttccttgattcatagcctccataccattttttacttctaataatttatatggtgttatttttactcttgtatcatacttgtgttctgtaatgaatttttctatttttttaatagaataaaaaccttttaaatccgataacttgattcaattttgttgaaaaggaatttgtagatcaataatgttttcaataatatgtttaacataagcttcatatttataataatcaacacatgaattatcttgatcgtaataaatttttataattttaagcatctcatttagtctagttttttcatagccttgattaaaaactatataaaaatctgctttatttgcataaatgctttcaatgatttctaaaaaattacgtcatgtataattaattggatcaaaaactaaatttgtttgatcaaaatctttttctattatttgatcatttacagattcaataatagaaacttgaaaaacaatttgttgataaggcaatgtgtaatcaatgcttggatatggtaaagaaatagactcaaagtcaaatcagattatccttgcatctttgattaaaaaattagttataaaattgtttaatttttctctttctgattcaacaattcaaatttgatttttttgattaaaaaatttatagtcttcattttgctttaaatcatttagttctgctggattttcaatagtttttataatttcttttgcaggtaaaaactttccactaaaacctgaaagttctgggtgtttttcacttaaaacttcattgaaaaacaggctttttttaaaatctccattgtcttttttgcttaattcttcaatggtactttgatttttagcttctaaaattgcatctattgctttatcaatttctaaaaaagaaccttcagctttaatggtttttgtttttcttccttttgctgaaggtattatattatcttttacaaagttggaaatgttcaaaaataaaggatttttttcgtattcttctaaagtcattccttgttgttttatcacttttttttcttcaaagtcttcatatttagataaactttttgtattttttgctatatttaaattaaaaacttctttaaaaggtttatcatattttttcatatccggaaaaatatctaaaataaataaagatattgtttctaatctaaagacatcttttaatgctcttcttgtaattcaaaattgtcagtttaattttattaagtctactcttttatgtgaagtacttaattttaatgtagaaattttcttgtcttttataaaaattacatctggtctggctatgcaagatctgtattcaaacactggaaaaagaaggatatcataagcgtttgaattaatagcttctttggtttcttgtattttttcttcagtgctttttgattttatagtgtaaattttatgatttggatattttttttcaatatattctttaaaatatgttggatattctctaaaaacattgtaattaacttcaaaaaacttctgttgtccttcattttcttcatctaacgctaataaagagtcaaagtttcaaattgatttttcttcatcttcttcttcgtcatcatctgaaaattctagttcactatcagataaacttttagaatttcctagagtgtgtcaaacaaaaaaaggttgagaagtataaaagttaaaatactggcgataagttatatattcttttttagtcatagttttaaaattgtaatataaaaagaagtaaaattacttacttctttttgattataatatctcggctttttcagtaaagtcttctttaagtactaaactaatttttgcttttaaaactaactttttaacttcttttgctattgcaggtgctgaagaaagtgctggcgattgcatacccgcgacgttgataaatgaaggattttcatcagctgatttgattataaagtcattagttgcaacatcgatcgaacgagaagcagcatatgtagttattatgtcggaaaaatctagttctgggaagattttttgtccaatttcttgaatctttttgattaaattaatgtttagtgtttttgcttgttctcttgatttatgttcttgtgcagttggtccaaccattattgttccatcaagtttttttgtaacaatcacaccttttccatatttagtaggcgtcataaagaaaattgattcaatatttttattattaactgagggcaaaatcaaatattgaccttttaaaaatctttgttcaaattcagcaaaacctgctagttttgcaatttcatctgcaaaaattcctgatgcatttataacaactttggctttaaattcaacatcttgtttgtttgtttgaacaaaaaagaagttatttttaaattctattttctctactttggtattttcaaataattgagcttgattatttttggctacttgtaaaaatgctaatgaagctttttgtggatcaataattcaagaatttgcgcaaactaaagaacctattaccaaaggatttaaattaggaaattgttttttagttgctttttcgtcaagaattttaagagcttttggatttaaattattttgaattcctttgttgtataaatgttgtaattctgctttttcttgttcatcaaaagctataactacagaatctgcttgttttctaggaaattttatttttgtaaatattttttcttgtcaaagtttgtttccaataacatttagttttgcttttaatgtgttaggttctgcgtcatatccacagtgaataattcctgagttagtagctgtagtttcgtttgcaaaagaaggatttttttctaaaagtgctagtttaatcttatatttagaaagttcataagctattgtgcttcctacaatgccagaacctattattaaaacatcgaatgaaagagttttcataattatttattttgtaaagcgtcagtttttacttctaatatagcatcagaaatagttacttctttatcttcatttgtagcttttgttactctaaatactttatgtcttggtaaagtaactttaaaaatgtatttgttttttaattttgaatcttgactttggctcgctggcaatgaatcaggtaatgcagtaaataaagcttgatcttctggggttggatttttttcctcatctttagttgtaaatgcctttaaaaagattttatatttagaaaaatcatcaacgttttttccaaaagtaactaagaatttaaattcagatgtttgtccatctgtgttattaatctcaccaaaactatcaagtgtaacgttttcaatttcagcttgggtataaaaagtataaggtaaaatgtttttttcatatgatagtggttcaaatgctgctttgtcgcttgaatcagaagcatttactcttccaattttagttatttggtattcagatttaggtttaagatctgttaatttaaataataaagctcgagctgtagtagcagtggtgttagcttctgcttgtgggggcattttagtttgcgcagttttttcttctgaattatttactggaagtccattatcagaaatttgtttgtaagtaagtgcaaaattagtgttattttcgtttttaaaagtttccttgtttagttcaatgtataaaaatttcaatgttgtattatcactagctatagaatcatcactaatagatgaaatatctggggatttcttggttgtaaaagtttgtagttcttttggtaacaagactaaacgttcacctttaaaaattcttacagcatactgagtttctttttctaaacctgtaattgtcattgataatctggaattatttggaaatggcaaactaatgataggttttacttgtttaaaatctgcatcagattgttttttgatttcgaatttgtaaagagcttgtaattcttcttttgttatgggtttatccttgttttctaactgaatattgtctaagtttattgttaaagaattagaatctaaattttgaatgctgatttttgattcttctacttttgaacaagaaactaaagaagctattggcactgctgcacttaaacctacaaataaagttgaaattaaacgttttttcatttttgtcctttgacttgtaaaattattttttgattttgaaaaaataaaatttttgtttattttactagttttaaattatactaatttttttcttttttctatgataaaaaagcaaatttttcagatttgatcaagtatgaaaattaaaaaaccaaagaaaattgaaagaattattgtctttgtcgctatatcatcattgtttgattgtaattcgaagaaaaaattcatgtgaaaaattgtattaagacctggtgtaaaacttataaatattattgataataaactaagtaaaaaacctatattcaaatacttacttttgcttcatttttcaagcattaatggcttatttactactaaaataaagctgtttaaagaaagagctatcgaaatagttataaaagaagtagaagaagcaaaaattgcttgttgttcttcagttaaaagtgtatttgcaataaattcttttcctaaaaaataacttattagagtaattgttgtaattaaaattgataaaattaaaattttgaaaataatttctttgttaaaaagacttttgttattttctaaaaaagttttattcattactggtttggaaatattagaaagaccaatcgcaattcctcctacagtttctgaaacaacattaattcataaaatttgtaaagctgaaaaaatattttctttaaaaataaacaatccaaaaaaagaaattaataatgcacataaattagcaattaaaagataaattaacaaaattttgatgttattaataacatttcttccatttttaattgctgtatatgttgttgtaaaattatcgtcagctaaaactacgttagaaacctgtttagttacatctgaacctgtaattcccattgcaaaaccaacattagatttttttaatgcaggcgcatcatttactccatcacctaacatagcaacaatatgttttttgtcttgtcaagctgaaacgatttttattttatcttcaggagtggttcttgaatatactctgtaattttctatatttttgcttcatttttcttcatttaatgcatttcattgttcttttgataagctttgttgttctgaagtaattaaatttatttgtcttgcaattgaattagcggtttttgcatgatctcctgtaatcatcactgtttgaatattagcgttgtgaagtttttctataacattttttataccttgtcttggattatcttgcattataataaaacctgcaaaataaaggttttgttcttcattttcaagcttttgttcgtctatttctcctaaaatttctttgtaagcaagagcaaaaatacgataaccttgttcattaaattcttcgtaagtttttaaaatatcagcatttacatttattgatttacttaaaattatttcaggtgcacctttagctattagaacaaatttattatagattttattaaccactgacatcatttttctttgtgaattaaagggaatttcgaatattcttggaaaggaattcataagaaaatttttgtttatacctaattgctggctgtgttctaaaatcaaaatttcttctggatcaccaattgatttattttctaaattttcagaatcaaaaatagcatcagtacacaaactggcaagtgttcaaaatttttcttgatttacttgataaataaaggtatcaattaacttcattttgttttcagttaaagttcctgttttatctgtacaaataactgaaacattccctaaggtttcaatagaagttatatctttaactaatacattttgtttggctagttttttaacaccaataattaaactaatagtaactaaaggcactagaccttctggaattactcctatagctattgttagagatattatcaaagcagtttgtcagttagcaaaattaccttgctcttttataaaaataagtgaaaagaagaatattaaacttaaaattgttgcaaaaatacctataaattttgataatttaataattttttgttgcattggagataaaacttcttttgtatttgaaattaaagaagcaatatttcctaactttgtatccttacctatggctgtaactagcaacttacattttccagatgtgattgtagagcctgaaaataaaaaatattcattttggctgaattctgcttcatttttgaaggaaaaattctttttataaactgattcagattctcctgttaacatagcttcttgaacttttaatttagactgttctaaaaccaaaccatctgctggtactacatttcccagctctaatagcaaaatatctcctaccaaaatttcgctagtttcaattacttgctcttgattatttcttataacctttacaacagaaaaattcatattttttaatgatgaaatggcttttttggtcttgatttcttgcattaatttaaagattacatttaatactataataaacaaaataactaaaggttcagcaaatgcaacaacttgttctttagaatctattaaattatttacatatgaatacaaagtgatagaaaaagatataataaccactattaatagcaaaaaaactaaagggtcttttaactgatctataatgttcataaataatgatttgggttttttttcaggaatcaagtttttcccgtattttgcttgattttcctttatttgtttatcatttaaccctttatttatatctatttctttaatgttattgaattctattttttgcaataacacttggttggtttctttattttttttcattattttccttctttttcttcacttaactttataatttctataataattcacaaatttttcctttttttatttaaaagcttaaatttgtgaaaatattattagtttataattttatattaattctctatttttaaaatataagaaaggaaaaagtttatgaaaatcattgcaaaaaacaaaattgcttactatgattatgaaattttagaaacttttgaagctggaattagtttaatgggttgagaagtaaaatctattagagctaatagagtaaatttaaaaaattcttttgcttattttaaagatttagaactatactgatcaaatgcacacatttctttatatatgactgtaaaaggcgatgagcaaagaactagaaagctgttaatgcacaaaagagaattaagaaaaattcactttaaaaagacaacttcaaaactgacattgattccattaactttatattgaaaacatggcaaaataaaactagaacttgcattagcaaaaggaaaaaccaagtatgataaaagacaaactgaaaaagcaaaagaagaaaaaagaaaaatagaaaagatactaaaaaattattcataagtatttaaaacgctttattttgcttcttttttcatgctttgcaactacttttatttcctgtcaacctaatgacaatttagttttaaataatgtcaaagatgaagatgaattactaaaaactttaaaccttcccaaaaatacaattgttgttaaaaaagcaaccaaattgcaagaaaaaagaagctatttgtttaaaattgcaagtaattacgatggcgatacatttaaagatattttcggcaataaaataagattatttggagtagatacgccagaaattaaacctaaaaacaacgttagatttataaatactaaaagagcaaattattatgctacaaaagcaaggaactttagcaaaaaattccttgaaaaatgaagcaattgagcttacattacaatcatcagtaaagatccatacggtaggtttgtaggcaaaatagaagtaggacaaaaagatttagcatctgaattattaaaaaacggattagctattttaagatattttcaagtagataaacccaagaaaaaatattattatccgaactataaaaacttatatacagattatattaaccttcaaaatgaagcaaaagataaaaaaattaatgtatgagctgagaaaataagaagcatatatggaataaatatttcttaattattcttgaatatattttaaaaatacacttgcaaatgtagcaatttcttgtgtgtaatcttcaataactttaaaatctattttagaaagtaaaatatcaaattcttgagctttttctcttgtatttttgtatttactttctacagtattgcttgagtcttgctcaataaagtcaaaacttttgaatgaatggatatgaaaatttcataaatcttttgaactaaagtatcagtgactaaaatcataaaaattgaaattattttgttgttcttgttttattattgactgaaaaatttgaatatataaatttgatgtttttattttgtttttataaaagcttcaactttttaatttatctatccctctgtgtttatactttttattaaacataaaaacttttaatactttcgttaaataaacatatctggtttcttgatttgaaaagtcgatttttgtatttggtaaaattattaaactaaataattcttgaaacttagctatatcgtctttgtataaaatcaagaatcttactaaaataagctcatttaaatattcatataaagctctaatacctacacttaaagaattaaaaaacaaagttgattgagagtttattttaagttgttgtaaaatcaaagaaaaacttcaaatgtgaccaaaatctttttgttcttctaactctaacaaagtagtgttaaaaaaattgtcaaatttttgaataaatttttttctcaaatctatactgtaatttaattttttacatttttctaattcttcttttccttttgtaattcaagaagtttttgtcgatggagtaatacctaaataaaatgaaaatttttttacaaaaatttctttaattggaaagatatgttcattttctttgaataatttaaataacaagttataaatatttgtaatgtctacttttatttgagattcattaattaaatttttcttatttttattatattttagattaaaaatttcttctactttaaattctgaatgtgcttcttttataagttcttttaaaatttttttagtgtttttaatacttataacttcaacatctttatgaattaaaatgtctaaaatttcatcttgattttcaaagcctatttttaaaatattttctataaaaataaagtctaaataaaaatctcaaatatcttctttttgaacatttaaaaaatccaaaatgttagtagtaatttgttcatttttcattaattgctctttagtggcgatattattagcaactaatatgttataaatatctaaaatttttttaccataagtaaaatttaaaacgcaattgtaatttttttcttgattattatttaaaaatttagcaatttctttttgttttaaacaagattcaactttaattttttttatagtttcaaaggaaaaatgatactttttaatattaaaattaatttcctctaaaaaggttaaaatttgattttttattgtagtatcaatgatcatatcttgaataagtcttttaaaaatttgacctttacttataaattttaatgcagaaattaatctgtttccctttaatactacatacttattttcttgtgctaaaacgataattttgcttcatttttcttcataaccgtgcgttaatatagaaaaaactagttgtttgaaattattaaatattttcaaatttatcgtagtaagattgcttgtaatataactattaaaacccattgattttagaatctcttgaaattctaaataatcgttataaaacacattagctttttttatttcttcgaaaatattattctggagaaagttaagattagtgtgtcttaaattacttaaattaatttgtaaattttcaagtgttactaacttcatttttgttcctattttgaaaataatttgatttttttgaaaatatgtataattataacaattgcgtgtttgaacagcttaaaattagtaaatgttcgctttaaaaaacttagataaattttttaaaaaacacgaaatggagacatatatttaatgttaaaaagaagacaattatctgtgtctgaatcagttggaaaaggacatccagataaaatatgtgatcaaattagcgatagtattttagatgctattttagctaaagatccaaactcaagagtagctgttgaagttatggcttcaaacagattaataattattggtggtgaagtttccactaaagcatatgtagatttagtaaaaattgcttgaaaagttgtctttgcaataggttataatgaaaatgactttactattatttctaatgtaaatactcaaagcgttgatattgctcaaaaagtagataaatctaacgatttaggagctggagatcaaggtgttgtttatggttatgcttgttcagaaaccaaggaatttttccctctttcagcttcacttgcgcactcactaactaaatacgctgaagaactaagatctaagaaaaaatttccttgagcaaaagctgatatgaaatcacaagtagaagtagattttagtaactgagaaaaaccaagaatagttaaaatgttaatgtctgttcaacacgaagaaaaatttaattttaaaaaattcaaagaatttattcatacaaatataatgcaaaaagtagcaaaagattacaatttaaaccttgattttgaagcaattattaatcctggaggtaaatttgtaataggtgggactattggtgatacaggtcttacaggaagaaaaattattgtagattcttatggagatagagctcatcatggaggtggtgcttttagcggaaaagactatacaaaagtagatcgttctggagcttattttgcaagatgaatagcaaaaaatttagttgcagctggtgtagcaaaagaattagaaattcaactttcctttgcaataggatttagtcagccaacttctatttctgtagaacaacttcaagttggaaaatttagtgaagaacaaattttagaatgtataaaacacgtttttaacacaagtgttaaaggatttgtagaagacttgcaattaagacagccaatttacaaacaaacagcaacatttggtcattttggaagaagtgatttagacttaccttgagaaagacttaataaagtagaagaaattaaaagatttttaaaaatctaaaaattttaaatttatagtaaaatttctctatgttttcaaaaaaatggaaaatttttttagccaacattagtacaattagtactagtgctgtgcttttttcttgtcaaacaaatgataatttagaaaaacaaaaacttcttgatgagataattcaaattcctttatttattgaaggacaagattatattaaagtaaaaaatctagaaaatcaagatttaggtttaaatctacttgattattcattgttttattatggacgtgaattaaaccaaaatacttttgaaaaaggtataaaaaataaagatattgatcctaactctacagaaacagatccaactataaaaacttctaacaataatgatgttttaataggttattcttatcatggaatttcagaactaaaatcaagtgaatttctacaaaaatgaaaggaaaatgaagataaaaataacatttgattttgaaaatatggtgatggtttttatataaataatccattttttactaaatataatttattttcacaatcattaggtttgcaaacaaatccggcagttgaacaatcagttggttctttaggaactttttgatgaaacattgattattcaaaattatcttcacttccttttgattctaatttccaaagaaaaaaagaattactagctaaacttgataaatatactataacaaaagaaagagaagtttttgattttgatgataagcctgacaatgcaggtgatttaaataaaaaagacttgaaaaagaaggtaaatcaagcatttaaagttcaattaagagcttcttttgaatttgatgatcaaacaatagctgatgataaaaacaatgaattaaaaaatgtaatttttaaattatattgagttcaagatgctgaaaatggaataaattatcctgatgattcaagattttcttattctggactttactcagttccaatatctcaacttaaatcaaatcccaatgttttatctgcgcaaaggagaataaatgtaaaaggttttgttggcgtaaattttcaagagttaattaataatgctttcaaagaaaatatacgaaaacaaaaagaataatttcataaacaaaatgcataaataaaaaatgaaatgaaaattcaaatttatttaaaaatccttcatttttgaagaaaaaattattttttataaaagaacttaagttcaaaaggagagaaaacataaatatatttttatatttataaaaatcaatgttatttgacacgtgatactcagcacttatttttgcccttgctggattagctttgtttattttttcagcaaaaattttatcaacatctttaaagcaaattagtggacctaaatttaaaaagcaaatttttaaaatttcggaaaacagatttgcagcaatgctatttggtattatctttacaactttaattcagtcttctgatggctccatggctctaattatgggactattagctgctggattaattaaattaagaggagctattgcttttttacttggagctaatataggaactgcgactacttccttgattgtttcctttcaagctagatttgcttttactgaatattttgttttacttttagtaattggaatatttggctatatgcttgtaaaaaaagaaaaatgatctaatattttttacattatttttgccattggtttaatatttttatctttaaaattattaagttcaggatcaaaagtaattgtaaaacaagaatggtttaaaagctttgtaaaacaagtaggaaaaaacgcttgagcttcatttttcttttcatttgtattaacagggataatgcaatcttcttcagcaactgttactttatatcaaagtatttacgaaggacagttttataatgacgctggtaagtttgtgctatcaaaaccagaaattttaagtttacctgctgctattggtttagtttttggagcaaacgtaggaacaactgttactggatttatagtttcatttacaactaaaaatataaattcgaaaaaaattgcaatagtttgaggatttaccaatttatctatttctattttaattttagcaatcattttttactttagtcagttaatagaattaatgattccgttgtccttaaaagcaccgtctttacaactttccatagctcacttgttgtttaatgctattttagttgctatctttatattcttaattacatacatagttaggtttttagattgattaatcaaagatgatcatatggagaaaaaatttggttttacacttacaaaagaattgattaaaacaaacaattttttagcactagaacaaggaaaacaagcactaacttctatgggtaaaatggtttatgaagggcttgaaaaagcggaagaattaaccaaaaaaagaagcacaaaactcaaagatcaatacaatcaattagaagaagttgttgataatgcaaggaaaaaactttatttttatctaatagaacttggacaacaaaaattaactacagaacaatctgaaatacatatgtcattaattttatcttcaagatcactagaaaaaatccttgatattggagcggagattcttgctgaactagataaggtctacgatcctaaaaataaaactcaatttttaataagtcaagaagttataaatcatatttctgaactaataaaaatgaataaagctattttacaaaaatctactgatcaaattaaatactttaaaaaagaaagaagtcatcacatcgaagaaatgagtcatgattttgacgagctttcatttaaatacgcaaaagaaaatgtatctaaattaaaaagttctataggtaaaactcaattagatttagattttgattatagtagagttttaagatctttagaaagaataaaccaccacagtttaagaattaatcattacttaaaaaattctcattgagcaaagttaaatatatactaatacaaacaaaaaaccatctttaaaatagatggttttttgtttgtaaatttttgtttttgcttcatttttcttcatatttgttaaattttctttgttatctataagtttaaattcttcaaataattgttttgttgttactaaagaaataaccttatttttaagttcatttaattgttcttcttcagtaggtatagcaaattgagcatctggtttatctgcctctgtttttaaagtatcttaaaatttactaaatttttaaaaaagagaaaaatttagtattatatgaagaaaaagtttgctttataaaaaacaaaaaagtaattagttgagcggatccccttttcttaggaaaatagaaaaggggattttttatgaaatattcattagaatttaaattagaatgtgtaaaaaaatacaaaaaaggaattgaaattaaaaagcccgattttgttaatacaagtcagaaaaattttttaaatcaagtaattttttgagaaaaaatttatgacaaattaggagttgaaggacttaagaaaaaccacgaaataaaaagtgaactatagatcaaagattaaacatagttaaaagatttttagctggtgaaccaattgttaaaatttcacttgaaaataatcttaatccaagtcaaatatctttttgaaagaaaaatatttagaatcgggaattagtggtttacaattaaacaaaggaagacaaataatgaaatctaagattaataataataaatctacaaaaatatcaaacaattccgatagtcaagatcaatcaaattcttcattatctgtatatgaagaactgaaacttcttagaaaagaaaataaacttttaaaaaggaaaatgaagtactaaaaagtgaaaagccttggtagagatctttgactcaaatcaaccaaggcaagaaaaataaaaaaatttataatagagtaaaagctgacaaaaaccttcgcttaactcaagtattaaaagagttttctattcctatatctactttttattatgaactcaaaaagaagattttgacaagaaaaatgaagaaattataagccaaatgaagcttatttttcaagaaaataaagcaagatatggaaaaagaagaataaaagcagaacttaataatagaggctataaaattggacttaaaaagttcgcagattaatggaaaaattcaatctcaaagcaatttgtcctagaagaaaatacaaatcttacaaaggaactgttggcaaaattacagacaatattttaaatagaaattttgtcgcaactcaaccaaatcaaaaatgaactacagatgtaactgaatttagcggttcatttggaaaagcatatttatcaccaattttagatatgtttaatggtgaagttattgcttgagatttgtctacaagcgctaacaaccaacaaattagaaaaatgcttcaaaaagcttttttcaaacacaaaaatcttgaaggtttaatttttcacagtgatcaaggatgacagtatcaacatagacaattttcagaaaaattaaaacaaaaggaataattcagtccatgtctcgaaaaggaaattgtttagataatagcgttattgaatcgtttttggaacattaaaaagagaatgtttttatggtcactgaaaagaatttttaacttttaaacaacttcacaaagcaattgcaaattatatttattattacaatcacaaacgaattaaagacaaaataaaatgaatgtctcccattaaatttagagaaacattcatttcaaattataattaattaaaacacttaaaaattttagaagaaaagggtaccacctcatagtaaactaattactttttctattatttatgtataaaaatatacgtataagttcgaggtattgattattattgattattttttagattcttgttctattgcagcaatatcagcatctaattgtttattggcatctttagaatttttaaaatttaaatcaaagaattcatttttgtcaacataatcggctttattggtatctgcaaattttatagttacaaatgttccaaaattttcaatttgttctttagtgtcatcgtagtttgtaagaataattattttggtaacattttcattttgaatttttttgaaaatttcttctactttatcaacttttttaaatgaaggatcttgtggattatatcctaaggttagataaatgctattttcaaatgcttttttatcttcttcttttgtaggaagttttaatgttgaattatctgtagttgaaatttctactctagttactaaaagttggtacaaattataggattttacacttaaggttgctttttcattgcctacttgtgatctaatggttttatttaattcttcgggattggtttgtaattggtttagttcttcggcatttgtgttgtgtgctttataaacttcggcaatgattttactttgttcttctaaatcgtcttgtttttcaggaggtaattgtgcgattttttcttcaatttctttttcagttgtttcaattaaactatgtttttggttatattcttcttgagttatagttttagaatcatttacaaaatcttctacagccattttttcatattgtttagcagaaggataacctaaatagaattcatcacgaagttgtttttgttctgcaacttcttgagctttttcttctttaacttttttaacaattgctgcatctaaagttgcattattgtttcttatattgtcaaggtttagttcaaataaaatgtttttataaactatattatctaaagttatacctttatatttagcatgtgttttagctaagtagtgttctactggttgtgcaaattctacttttacaaaacgtcctcaattagttgtaggattttcggaagtgagtttgtttgttagtaaagtaatttttttaattttagctccggaaacctctaattgttttaaaatactttctatttttggatcacggatgaattgagttggtttatcttgtgaaatataacctagtaataaatagatgtatttttcaaatgtatcttttagttttggatttgttgatatttcaaaagatgaattatcatatgtagaaatttctgtttttattaaagtcaatccatacatatgatatggtttgatatttatatttgctttttgattttgtagtatttgtctgataattttattgaaatcatttggattgttttcgatttgtgcaaattcaccagcatttgtattgtgttttttaaatatttcgtttttaattttgttaatttctactggatctttttgcttgtttgtatcaagtgctttaattttatcttcaatttctttgttaattaatttaatttctgctgcttttgcatcatattgttcttgagttatgaaactttcatcagcttcgaaatcctttgttgtcatagctaaatattctttagcttttggatattgttgataaaaattatcgcgttgttctttttgttcttcaatagtttttgcaggtgctggtgttttggaatttcgttcttttgctaataatttagcaagaactaattcatattcagaaccattttctttaagttttttaagtaagtttgcatttttttgagcaaaaactacatagtcttttattgtttgtttaacttgtgcatctgtagataattttttatcatatgaattagctaatcttagagctagctcagtatttatatgtgcacttagttgttttttgtagtttactaattcttctggaagagctgaatttgactcaaatacttttggacctgttgtctcttgagcgcttatgttttcttctaaaaacttagtaataatatttgttttttctgttgttttttgttcttctgaaagtgtggtgtcgttatctatttttgaaagttctttatctatttggagagactctgctaatgaaataatgtcatccttaaattcagttaattggttttgatcagttggtaattttattttagagttttcttttgcttgcatagattccaaagtatttaaaataacaggtgaatatagtgaaattggagttttatattcaactttagtcgctgtttctgttttacggtttggaagtattaaagccatagcaattatagaaggggaagcaagtactaaaaatactgcaatacccaacgctaatttactcttttttatgcttttaaagttcatttattagcctcttttcttttactaatcattattaattatatataatatatatatatatgccaagtatttcgtacaaaaacatcaaaaatgaaggaaaatgaagaaaaaataagtattttttgttattaatgaattttattaagtaaaaaaatattaaaaaaaccactgcaaaataactgtggtttttaagcttaattttttaacgtaatttttgatttttaatttaaatttttgtttaacaaagtttatattaaataagaaaaatatgaattttataatcattaataattacttgtttttaaatgtattggttaaaagttaaatatatcaaatattcaaattttattttgcaccttcatttaaagtgtatatttacaatatatagttattatttttaataaaaaatatttattttaaaaaattaaatttaaagaaaaatgaaggaatttttataaaaaattcgtttaaaggctaatttaaaggctaatttaaaggctaatttaaaggctaatttaaagtctaatttaaagtctaatttaaagtctaatttaaagtctaatttaaagtctaatttaaagtctaatttaaagtctaatttaaagtctaatttaaagtctaatttaaagtctaatttaaagtctaatttaaagtctaatttaaagtctaatttaaagtctaatttaaagtctaatttaaagtctaatttaaagtctaatttaaagtctaatttaaagtctaatttaaagtctaatttaaagtctaatttaaagtctaatttaaagtctaatttattaatatataattataaattttttaacaaaaaattatttattttgaagaaaaatgaaggaatttttataaaaatttgtttaaagtatcatttaaagtatcatttaaagtatcatttaaagtatcatttaaagtatcatttaaagtatcatttaaagtatcatttaaagtatcatttaaagtatcatttaaagtatcatttaaagtatcatttaaagtatcatttaaagtatcatttatataatatataattataattttttaacaaaaattatttattttgaagaaaaatgaaggaatttttataaaaattcatttattgtgccatttattgtgccatttattgtgccatttattgtgccatttattgtgccatttattgtgccatttattgtgccatttattgtgccatttattgtgccatttattgtgccatttattgtgccatttattgtgccatttattgtgccatttattgtgccatttattgtgccatttattgtgccatttattgtgccatttattgtgccatttattgtgccatttattgtgccatttattgtgccatttattgtgccatttattgtgccatttattgtgccatttattgtgccatttattgtgccatttatataatatataattataatttttttaacaaaaaattatttattttgaagaaaaatgaaggaatttttataaaaaaataatttaaaacgctgtttaaagtgttatttttataatatataataataattttttatataaaaatttttgactttaatgtaaaaactaaaaatattctatttatttgttttaatttttcattcacctgtttttttactaccttgcctttgaatttgtccagattcttgtagttgttgcaaataacgagttaaagttcgtttaggaacttttaactcttgaaacatttcatcaatagtaatatttggattttgctttattaaatctaaaatgattttgtgcctttctattactttatctttaacattatcttttaaattagttcaattaatattagttggctcataatttctgttatataaagttactttaaccatatttgtattaacatcaaagttaggttgtttatcaaaatttttatagctattaaatattaactcaactcctcttccttgttcttctaccaattctaataaacgtaaaatttgagcaatgcctttatttcttctgttatttacaccatgtttaatttgttctagtgttaaattttctactaagcttcctggtgagtaaatttctactctatcatcaaaaaaactaattgttatatctgaatttataatactataatctctatgacaaaacgcgtttaatatcgcttctcttaatgcttctgttggataatctctaacttctaatctagtataacttggaaaagtagcttttgttttgttgtaaatttctatagtttttagtattgtatcaatttgttctaatattgaacctgataaatctgctttatctaaaaaaatttcttttgtaagtccttgataatatgctatttttgtaataatctgacactgatcactaaaatacaatgcaatgttgttatatttaccatcatcatttattaaagatagttttttagggttaaactttatgtttagtttttctaaagctttttttaagtaattgaaagttaaatctgttctttcgatagactttttttcaaaataatatggctcagagtttaaaaacattctccctatttgttctaaacttgcacgttgagtggtgctacccattcgaacaaagaattcaggactagaattacttaaagaataaggcttttgttttccttctttgactgtaattttaaaaggaattgtgctgctatctcaacttataagatcataaccatcattagaaagttgagattttcacatagatagtttatctattcacgtttgttttatcttatcatcaatttgctggttaatacaacgggtttcatcatcaacacctaaataaattattccaccatttgtatttaaaaaagccaaaatagttcttactactttattatttatttcttgtttgtattctacatttgtatcttctatttgttgcatttttttacaaatattttcttgatttttcttcattttaactcctacagtatttggtatttttattttataataatttatttattttcttttgctgtagttgttaagaaaatatcatgaatacttacatagtcaacattatgtttacttggaaagacaatttcaatttggtttataaattcatttacatcaaaagtatatgtaatcattgacttatcttttgatcaaataggttgttgttttatacttaattttgtttgttttccatctttattagttacattaactacaaaagggtctttaatgtatttatctaatcctgctttagctggtcagaaataactaggatcatttttaaatttaagttttatttgtccaacaaaatttctcttttctgattttggttttacaaaaaatttgatatcttctgaacctggtcaagcaaatcaataataaccgtttaaaaagacattttcaggtttgtaatattgtaatcatcaactaccaaattgtgtagcactagctattcaatgtttagttaattctttgtcatcgataattttgttcaagttttttcaatcatgttcataaaatcttgtgtttgctaaatagttaatgttatattttatttttaattgtccactttgattattaactatttggaaataaaaagaatctaaaagttttttgtatttttcatctaccaaatttgtaataatttcttgatttacaaaagatggaagtaatttatctgaaagtttgtttaattcttcttttactttattttcgattacttctaaagtttcaatatccaagactttatttttatttgaaagttgaatttctttaggttttgaaaaattttcatcttttgcaagtaataatttttcaattaagtatttacctttttgattaaaaattgaagaaatagtaatatctaatttattttgttctttattaaataaaaagctgttatttttctcagtttttatttgcttttcttgttgattttcttgatttttcaagactaatttaaatttatttttgtttaaatctaaatttgtatctaaactaatatttaatttacctgtctttgtatcaatatcagaaatttgtttaatttctaatttattttcaaaaactcaaggtgtgaaaagattaaaactagcaacggctgtatcttgatttgttaaatcatatacatcaattttgtttactcgatattttttatttaattctaaatttgaaaaagttaaattcacttcatttttgaagctattttggtcaattgtggcttctgtagttaatgttttatctttgttggaatcatcaaagtaataaacttttatttttttattttgactaaaatctacttttgaattttttagatgattatttacaacaatttttgcatctacagaatcaaaagtccttgattttacttcaaaattagaaaaagtttgagaaattattaatgaatcacttatattaaaatccctaactggaaaacttgttttttgctttgaattatcaagtttttctaaagttaaaaatttgagagtatattctttgtttacttctaaatctttaagatctagtgtatattctaaaactttaggatcttttagttctacaaaagaagtctgcgcaattttattatcactagaatggtattctaatgacaacttattatttaaatataaatctgataatttagaaaactttaattttattttgtatgaagagtgtttgtcagttaatttttgtggatctacttctctttgtaaagttatttttacatcttcttcgtttataaaactaatattttgtgcaaaatcttgtttgttataaattacattgtcattgtttttacctacattttctaaagcttttgtaggttttaaaacaaattttattttatctaatgtataaatagaatttgcagttagattagaaacaacaaactcaattttgtatttattatttgcatctttagtaattttagctttagattcgatttttttatcttgtgattcaaaagaaactaaaacttcttgattatcttcaagaatattatcttcactatttaaaaaaatattaattttatattcattttccttcatttttgaagctaaatttgaaaaatcaaagctaattgctttggtttttgtaataaaagtttttattaattcagtaggtaaatatattggtttttttatttcagtatctaggtaagtaagagaattgattttatattcagaatttgaatctaaattgtttaaattaaatactaatttactattatttatagtagaaatagcttctttttgtgtgttgtttttaagatttaaaatagataattttacttctttttctgaaacaatttgattattttgtgctaatgtaaattctacattcgcagatgtagaaccaatattataaaaatttacattacttactgtagtaaatgcattttcaacatctgattgttgtgaatgattttgatttgttgaagtggaagaaaatacaaaataaatttcccaattttttaaattaattaagatattatcttgtttaacagatgttagtttaaaaattcctattgtattaaaagacttttgttttaatctaataattccattggcatctgaatgctcagaaaattgaattaacttatgattgttttgatcctcaaaagtaagttgtacttgtttatttgcagataattctttatttaattcaatttcttgtggttcaatattattattttttcaagcaatatttcttaggttaatttgaggttctatttttaaaattaattcagtagctttttcatcttcataaatgcctgttagtaaaaaatctgatctaacaaattcttttgtaactgaaggataataaataatagcctctgcattttcatctacagaagaaagttcaatttttggaagaaatgaatttggatgttcaaatttagcaaatactgttttatttgcatatttagcacctaatttgatttttgctgctatatcgaaagaaccattattttctctttgtctatattctagtttatattgtttatttttagcaatagaatttttataagataaaggcactgcaatagatacagttattacaaagaagataacaactgctaaaataatagttaaaagtttttttcttgatattttcatgagcaattcccctgtttttatttttgttgtaataatatacactaaaaaataaaaattacaacaattttgctcgttgtaatttgttggctgtaataaattattaaaaatctagattttttgcgtatttggcattttcttctataaataattttcttggggtaacatctgttcccattagttcttcaaatacttgtgttgcaattatagcatcttgaatttgaacttgcatcatttttctagttttaggatccattgtggtttctcagagttggtctggattcatctctccaagacctttatatctttgaatagttactttttgattatcaaattctttttggattatttcttctttttgtttatcagaatatgcataaataacttttttattagcagaaattttataaagtggaggttgagctatgtagataaaaccatattcaattaaaggtttgaaaaatctgtataaaaaagttaaaagtaaagttctaatatgtgaaccatctgaatcagcatctgtcataataataattttgtaataacgaattttattgatattaaattcagcaccaattccagtaccaaaagccgtaattaaagataaaatctcttcgttttttagcactttttcaaaattagttttttgagaattaattactttacctctaagtggtaatatagcttgaaaatgacgatcacgacccattttggcactaccaccagctgaattaccctcaactatatatagctcactaatttgtgcgtctttagttgtacaatcagccagtttgcctggtaatgagttaatttcaaatggtgattttcttttgattgcttcacgagcagattcagctgcttttcttgctttttgtgataataaattacgttcaataatttttcttgcttgatctggattttcagctaaatatctttcgaatacttcggaaaaaattttattaacagctggacgaacttctttgttgtttaatttacctttggtttgaccctcgaaaattggatttgaatgtttaattgatacaacaacatacattccatctttaatatcttctcgggaaaatttttcttgttcagatttaaagaatttattttctaaagcatagttatttaagattctagaaagtgaatcaaataaaccagtttcatgagttccaccttcacggttgtagatattgttagtataagctaaaacttctgatctatcttcttttacatactgtaaagaaatttctgcttttgtgtgatactcttcagtagaaatttcaccttcagcataaataatttcattatgtactttttctgagcctttagttaactcgctaacgtaatctacaattccaccttcaaataaaaattctttagaaaaattgtttctctgatctttaacaataaattttaagtttttagttaaatatgcggtttgctttagtctatctaaaataatgtctaaacgaaattcgtttggttccataatagtaaaatcaggtttaaacattatagttgttccggttgaattatcagctacagtatctattacagataagtctgctaatttttttcctccgtcaacaaattcttggaagtaaagcttaccatctcttttgattcatacttttaaatttgcacttaaggcatttacaactgaagccccaactccatgaagaccaccagaaaccttataggaactaccatcgaatttaccaccagcgtgtaatatagttaaaactacttcagcagctgaaacattgtgttttggatgaatacctacaggaattccacgtccgttatcagttacttttacatatccgtcggttgtaatttctacttctattgtatttgcataaccagcaagagcctcatcaactgcattatctactatttcccagattagatggtgtaatggtaatattccagttccaccgatatacatacctggtctttttctaacaggctcaagaccttctagggtctgaatactatctgcttcataatttttacttgtcattttgtttcctaactactaattgtaactagtgcttataatatttttaaattataccatttttttgcttttgtacaagttcgcagactaaaaatttcgctgtttgtcttttgttttggagcttaattatacaaaaaaatactctaatgcaaagagtatttttgaattaatttatgtcttccataatgttgatgacttctatttgttgattatctaatttagtattcaacttcaaaacaacagcattaaattgtgaataattatttgatgctgtaaatttaatcatcttatcataacgcattttttgatagacctttaaaaaatcagctccgattgcttcgtttcttggtcctgtcataccaacatctgttatgtataatgttccttgagataattttcttccatctgaagtttgtacgtgtgtatgagttcctacaattgcatttattttaccatttaaataaatggacaacacatttttttcagatgtagtttcagcatgaaaatcaactaaatgaaagtcagctttatcttctaaaaccacttcatcaatggcatcaaagaaattatctgcataatcttgtttccaaggttttattagaccattaaatgaaatacctaaaagtgatgtgattctaaaatttaaattgtttttttgaaaaactacacttccgtatcctggataatcaaggccattaatgtttaatggtcgcacaatatcgttattattaataatttttaaaatttctggattagatcagacatggttacctaaagtaaacacatcaacaccagcttcttttagttctaaatagtctttttcattaagtccttttcgtcctgagacgttttctccttgaactacaactaaatcaaaattgtatttttgattcaagactggaaaatgttttttaaagctggcaatccctgctttagaaaaaatatcaccgacgaatagaactgttgctgattttatcatattttctctcttttatttttttttttttttttaatatggctgttttaatcaaaaccactttgtatttttatctgtatttcattgatttacatccagattataaattaaagataatgagtttttaatttcttttgcaactaaaagatgtgtattttcaaaagtatgtccatttgctaataatgattcataagatctgaaaaataaagaaaaaatattggatttaaaatttcttaaatcattaatatttattgattgaatgtttcaaaatattggaaattttttgagtaaaaatttttctttgtcttgttcaagagtagataaggtatcaatgatgtttaagaatatattgttaaaatttgtgtttaaactaaaactatgtttcactaatatatttaaatattttaattctgtaccagaaaatttttgatcacaaaaataatatttaatttgtaaattattttttaaaaatgcctcttcaattaaatttaaatgattaaaattaaattctttttcaataatcattgaaaaaatatgaaattggtttttatatgaatttaaaagttcttttgtagttagtataggttttaaagagctttgattttcttgtttaatttttactaatgcagtagaagtagaagaagtagaagttttattttctattttttcattttttaaatttttgttattagtgttattagtgttattagtgttattggttgtttgattttgtttttttgttttcgaagttttaagaagtgattctacttctatttgtttatctgataatttgtgatcaaataaaactatttctaattttttttcttttcttttagttgaatttggggtataaggactaattatcacttttcattttactttgttagcgacaaaagaaagttcatttcctttttcttcatttgttttccgatgaacaggttgtagatttttttctgaatttttaaatgatttgattaatgatatttgtgatttatttatgttttcaaatacattttgaggaataatgtggtcaatgtctcataaacctggatattgtgaatagtcttcttcagaaactgtagatgattttttatgatctttaattatttctctgcctgcaaaatccaaacaaggttttttgtttatacaatactcatcgaatattctatcttttgtttttgctctcatagccatataaattgttacctttttattctataaatatatataataaattacattgtttaaaatatttatttatcataataaatatataaaattataaattattataattttttaataataaaaagataacaaaaaatcaagcaagtgcttgattttttgattatttataaatattattattttaagaaggtttgtttgaaactatcaagtgcttcttgttttcctttttcatctatatttttaaatacagccataccttgtaagataatggaagttccacctttggagaaacctcatttacttaaattttgtttttcattttgtttaagatgggataattgtttgtgagctcaagcatttcaatctgatcaatcttctactttttcaatcgctctacttccgattactgaaaaatcaattcctcttgtaaagatattaaatacagctttatcatctttattttggaagtttaaatttccaccttttaatgtaaaatcatattcttgtatatctttatcatttctataaactaaatatttaaaattaatggatggatcttcaatagtgtttaaattgtttggtctaattccagattttaaattaatttgtaaaataactttagaaagtgaattatctaagtaaagattatcaaatcctgaattttcttttgaagcttcagaataaaatttatttttttcaaacacagatttagaaagttgttgttcttctccaatatcttgtttttgtttatctcaaggaccatatttaggtaaactaaagctactatcagttaatggaactaatttatcttcatcactattagaagtttcatctgtaataattgcaggagaaattttatctaaattattagtagaacctttaaaatttatagtccctaaaattacagctctagttcctgaatttcaaggataactaaattgtaatccatttcatatttttctaacttgatctctatttttttgtgctagatttgcagcagcaaaatattctaatcctaatacataagtttgtaaattatctttacctgataaagtttcagttgattttactttttgtaaaaatactgatactctaccgtaagaagcattatctagtgtatttaataaataaattcttttattaccttgtttttcaagttcatatggagtaaatgctagaagtattgaaccatcataaacagatgattctgcaactttggtattttttgctatataaggtgcaatgttttcttttgtagctgaattatcacctttagggtctaaatttacatcaatgtcttttttaacttgtgagtctttttcaaaatttcaactacttgtttttaaatttagttgtgaatcttgtaataaaatacctttaactgatggagttttaacaaagtaagaatcttttgtagatttgacagatgaatattttaagctattaatatctgttttaatataaccaccagtacgttgtcaattttgattaatactataagttaaatcaactgcatctggagtataagtaatattatcgtttaccaaggaagaaactgattttactttactaatttcagaatctttaggattgatgaattttttggaaagtttatcactaattgttataggtttttctgtctcaactgctgaagttgcatctataaatagttgtgctccatattttttagccacttcatatgctggagaatcgtttacaaatcctttaattgcaattgtttttgtagctagaacttcttctggttttgtagaatcaactaaagttgtaataattaaaacttgttgtgtattttgatctaatttaaaatcaaattttgcaactgttgttgctggaacttcatctgtaggaattgtctgaccaagagcaaatactctagaaattgcagttgcatcttctttagataaaatagtttctagatattctaataaatgtctttcaattgctgaagttagtttttgatctttggatgcaaatacttcatttaaagtcattaatttatatgctacagattctgttgttgttgttgtacttgttgttgtacttgttgttgtagtatcttgtgaagcttgtgggtctgcttgtgtttttttagcatcagcttctttttgatcttcaacaatacgagctggaattaatttattaaggtttgcaattatatcagaaccaaatgtagttagattatttttttctaatgaaaattcacttacttgatcatctttagctaaaacaattgaatcaccttcaccagtagttggatgtagcgcttggtctaatactctatcatattgagattggaagagttttaaattaaatttacctaattctaatgtttttgctgtagaacttgtttgagtatcagtttgttgtggatcgctagttttatcagaaatttctaatttaacatctactgaagcttttcctgttttttgaactaagctttgttctttatcaaaagtaaagataagttttaaagaattgtttttaaattcttctgctaagttagtacctaatttagaagcttctaaagttacttctttttttagttgttcatcagttaatgatttaaagatattagaaattaaatttcttttgtctttaaattcattttctttagctttagttataaagtcagtaagttctgataaagtaactaattgagctggatttgtatttaaaatttgttgaattgctttagcttgtttatctcttgaatttaagttttcaacacttactcttcgagaaatagcttgtgcattagttgtattttttggtgttaattttaataataaacttaaagtacctttatcatcatcttgctgtattgaactttgtgcttgttctacttctaagttgtaattgtctacaaatactggaacattttgagcatctactaaacttaattttgtaaattcttttaatttctctaaattaggtttattatcagaagatgaatttaaagaattagttaattgtgaaacaaattcagatggaagtaagttttgtttagattctaaagcaattaattttgaattagatgaaaaactaaattctgatttatttggattagttgaaaatcctgatagaccagcttttatttcaaagaattgacctttatttcttgcatctgttgtatttgaaaaaacaataaatttaagatctttaattgttgttccagcagctgtagaaactggaaattgatctgttttttctgtttctactacagttcttacttcaaaatctaatcctttttcttttagttttgattttgaagcatcatcaatagcatctattaattcaaatgaatatgttttgttattgtgtaattctaatgcgtcagatgcacttaattttgtaaattctggttttagtttaaatgaagctattatattttcaacatcagctttggtaactgctgtatttgaatcttgtaattgaattatttttgaatctgctgttgtacgttgtgctagttttctggctttagctgtaagaccaactgctgttgatgtaactactaatacacctaaataaacaacagcacctagaactaataaaacttttttattttttatcataatttttcctttatttaaatttaaatgttgttatttattgttatttgttcattgttttcttaattttatctaaacctaaaattctataaacaactggctcactagataaaattcatttaggttctgctttagtttgttgagtttgtgcttgtggattattattatttgcaccatttgaacctggggttacatctggagtaggtgctgctggagctgcttttttagcttcttgttcttttactcaagcaggatctaatttagctagatagaatcttaaacttaattggttaaagtcggttctgttgtttaagaatccaccttgttgataagctaatttaacatcgcttccaatgtaagcttttagtgaatcaagagctttttgtccaaagtattcaacaaatttgtcttctacttgttttccagtttcgtctgtatttttgatttcttgtttgaagtctttgtatctttcatcactgaatttattttgttcttcagctagtttattttgttgagcttcacctaatgaactaccttggaatgtagtttcagtttgtggaattgtttttactaatttgtttaattcttgttgaattgcaaagtcttctgaatttagagttgcaacttttagattaattccaactttagctgttttataaactgcattacctaattcaccattttcttgtggtacatagaattcatatcagtagtttaatgttaaagtatcttcagctttgtttttaacttcgtcatctttagcaatttcaaatttaattttagattttcaagtagatcctaatgatctataaccttggaagttattttctaaagcagcttttacaaaaaatgcttttacaaaatcatcttcagataatatttctgtttgtttatcagtatttgtagtaccttgttgatcttctaaatacacaccatttaatgaataatcttttcaagtaacattatcttttttaattttttcaataaattcatcacctaaaacagatttgaagtatttttgaacttgtgaagaaacaaagtctttagtagtatttttagtaaattgtccaagagggaagattgaaagatcttcattgtctaaaaattgtacttgatttgatgaaagtgaaacatacttaattttgtttttcttatcttcgtcagtaacttgacctgaactatcaagtctagcaaatcaatctgaaatttgttggaatttttcataaattgcttttagatattcttcaactgttttattatctaaagttaataaatgtgcaaagaattgtccaacttcattatctgttttaaataaattaattgaataaactctatttcttttatctgcaccagtaatttggaatttaacttttttgtttttaatttcttcaactgttggcattttgaagctattatcagaagttagagcatctactaattctttttctgaaaatcttattctttgatagtagttgttttttaaaattgataataatttatcagaatcttgtgcttcaactaattttttcaattcttcacctgaaataggtacggctgagtcaaatgatttactaatttgattggtttttgatggattaaatactaatttaccttcgttttctgtatcaaagccatttgtaggagcaaaaattgcttttacagtagataaatcgtttaattctacagtaggattaggattttgatctgttgaatattggttaaatttacgtaattttacaaatttaactggggaagtttttcctttgaatttgattgtataaggaacttcaacatacaatccattttcatctcttttagctttagcatctgtaccaactgctagctcaatgtctttatttacagtttctgataattctttatcattaattgcaaatttcattgtttgtttgatgaatgcttgtaatcttttatttaatgcatcttgtttttctttattaagatcaatattgtctgcatatcatcctgttttagatttgtaatcttgataattgttcaacattaaaggaggattattaaatgctctttgtaatgtaagaacatcataatctgagattactaaatcatttttgtgatctttaaagaatgaatctgaatcatcagtgattttttcaccatcagctaatgtattattaaaactttctaaagtttgatactctgaatcttttacttcatttttaggatcaactgaagcaaacactgctttatttagaacatcagcttttgtaataaagatactttctttaccttttgcatctttagaaattgaaagtaaatcaatgtgttcaaaatcggaatttacaccagctggtaattttgccttaaatgcatctgctaaagaagtttttaggtatacagtaaatacaccttcgtttcctaaactttcagttgcaaattcttcttttgtattagggtttttaataaactcaactttaaaagtatcttgattgttaatacttttttgaagactattaagtgttgtacttaatgcaaaatatttgtctaatttagttttaaaatcttcagatgaagttgcagagttaacatctgtttcaaattctgctgaaaaagttgtagatggagtaaaagatgttgtagctgaatctttaaataaactctcaacttcttttttaatgctgtgagctttatctaaaactacaaattttgcttgatctaatactcttattagtttttcaactacttgtgattctacttttgttccatcattaaattcagtttcaacttggaatttaactaaaaaacctttttgtgcatcttcaggtgttactgataagaattttacaacagagctttttacatcttttaaatctgtatttgcatttgctgtttcttctggagttccaaattctttgtctccagcccaaactttaaatacatcacttcagtctctaggtgattctgaaccatcttgatcttttgcaggtaatgctgtatatgttccattaggatctttagtaaagaatctatctcttacagtttcatatgaatctagtaaggttaaagttttatctttgaaggaaagatcgcttatggttttaacttgtttttgtggaacatcaatataatttctaattccatttccggacattgaagaaagcccgactattaaaccaaaaacaccaacagcagctgcacctgcagcaactcctattaaaagtttctttttcatattttaccttccataattttgttttgttctatataagtaaataaaaatttatcaactgcattagttgaatttatatagtatttaaaattattatgtttgtataagttctgtaaaattataattaatttttaaaaaaacaaaaaattttaaaaaatttggctttttgcttattattatttatagtatttgtaaatttaaatatttgatgcattaaattaattgtttatttaaaattctaatagttaatcaatagttaatatctataatataaagactgcacaatatataataatttatatgtaaaaattaaaaaatgcttcaaaatgagcggatccccttttcttaggaaaatagaaaaggggattttttatgaaatattcattagaatttaaattagaatgtgtaaaaaaatacaaaaaaggaattgaaattaaaaagcccgattttgttaatacaagtcagaaaaatttttaaatcaagtaattttttgagaaaaatttatgacaaattaggagttgaaggacttaagaaaaaccacgaaataaaaagtgaactatagatcaaagattaaacatagttaaaagatttttagctggtgaaccaattgttaaaatttcacttgaaaataatcttaatccaagtcaaatatctttttgaaagaaaaatatttagaattgggaattagtggtttacaattaaacaaaggaagacaaataatgaaatctaagattaataataataaatctacaaaaatatcaaacaattccgatagtcaagatcaatcaaattcttcattatctgtatatgaagaactgaaacttcttagaaaagaaaataaacttttaaaaaggaaaatgaagcactaaaaagtgaaaagccttggtagagatctttgactcaaatcaaccaaggcaagaaaaataaaaacatttataatatagtaaaagctgacaaaaaccttcgcttaactcaagtattaaaagagttttctattcctatatctactttttattatgaactcaaaaagaagattttgacaagaaaaatgaagaaattataagccaaatgaagcttatttttaaagaaaataaagcaagatatggaaaaagaagaataaaagctgaacttaataatagaggctataaaattggaattaaaaagttcgcagattaatggcaaaattcaatctcaaagcaatttgttctgaagaaaatacaaatcttacaaaggaagtgttggcaaaattgtagacaatattttaaatagaaattttgtcgcaactcaaccaaatcaaaaatgaactacagacataacagaatttagcggatcatttggaaaagcatatttatcaccaattttagatatgtttaaaggtgaagttattgcttgagatttgtctacaagcgctaacaaccaacaaattagaaaaatgcttcaaaaagcattttcaaaacacaaaaatcttgaaggtttaatttttcacagtgatcaaggttgacagtatcaacatagacaattctcagaaaaattaaaacaaaaggaataattcagtccatgtcccgaaaaggaaattgtttagataatagcgttattgaatcgtttttggaacattaaaagagaatgtttttatggtcgcgaaaaagaatttttaacttttaagcaacttcacaaagcaattgcaaattatatttattattacaatcacaaacgaattaaagacaaaataaaatgaatgtctcccattaaatttagagaaacattcatttcaaattataattaattaaaacacttaaaaattttagaagaaaagggtaccacctcaaaaatgaagcattttagagttttttattagtaaaatatttgttatttataaagctaaaaatgacgttaaaatttttatctattaaaacaatattagctggtttattttctgctatatcaccatataaatgagttaaattgagtgcttgagctacattatatgaagagacttttactagttgtgatcaattaatattggtatttttctttaaattttttaaaattttgttataacccttgccagaacctgctattgttgaggaattttgaatataaaataaatctgattttttttctacttttaaaggaccaagatcatagatgccgttttttaaacctttttcaggtagtgaatctgatactatgcatatattatcaatatctaacatatttaatgtaaaagctaatgtagaatttctaatatgcaagccatctgcaattaactccactaaaaaatttttatgcaatttgttttctaatataagattcaccagtgattcttgtctttgattaaacattgaacaagcattataaaaatgagtaaatcttttgtaggttgttaatttgtgtgttttagaaaaattaaaacaatttgaatgtccaatagtaaaatcaaagtcattttggtatttatccaatagttttgctacattattttctggtgcaattgcgattgtggctttgaaatttaaatgattttttaaatattcaagatgttgttttttagctgaaataattaaatcttgtttatgtgctccttttttttcttttgaaataaaaggaccttctaaatatcaacttaataaaaatgattcataatttttatgtagataattaaatttttcagtaaataacttaatgttttttcaagtatctgtgactgtggttccaaaaactgctgctacaccctcttttttatgtaaattatttttgtattttaaaaatttagttaaaaaatctatttcatttattttattaaaagaaaaaccataacctccgtgagtatgagaatcgataaatgctggtaataaaatgttgttattgcagtcaatacctactttttctgtatgtccctttactattttctttatttttcctgtttgatctatttctaaataacctagaaattgttcatctttggttgtaattaatgcattttttaatatcataatttccttttgcataatgataaattaatacttacaaaatttttattattatgaaaaaattttttagattttatcattagcatttatttcaaaatactttggatttactttggatttaataatttgaattaattgttcgtttttatagcagaatttgtaaattacttgcttatttttgctatcaaatttgtaaatttgttttttgaaactaataaaattattcttaaaatcacttactaatttgtaagatttttcgatatttcaaaattctgtttttttatgaataaggtattcagaatctataacaatttcttcatttttgaagcattttttacgataataagaaaaatctactaaatttttttcttctattaaagcaaattgattaattcaaattgctttgtttttatcttgaataggttctcacgaacaaaaatctaaataatatttggaagataaaggcattattgttttaatgaatttttgtactattattttagaatttttgcttgttttttcaatatcaattttttttattttagtaaatagaaacaaaacaatggtttttgatacattaaatttgttaatcaaaaaagtaatttgttgttctgaaagtggttgttttggaaactttataagaaaatttgtaatgtattttataacttgaatatgtttattacttaattttgaaatactacttaattttcgtgttttttcttcttttttcttcataattttaaaaaaataaaactaaaaaatagcaaaaaattgctattttttagaataaatattattagttagaactagtattattggaaatgagttttaaatttttgttttctattaaagtatctgtttttcttccaagaacttctatttcaacaattgaagtattttttgataaatcaactgaagtaattttacctatttctcctataaacggaccttgtattatttcaacaactgaaccttctttaaacggtgaatcaacagtgccgtattttgcatattcagctattttttctttttgtttttgttccatttttctaatttctttttctgaaacaggagttggcttagttcctttaccagaagaaccgattaatcctgtgatatactgtgtatttcttacaataaatcaaacagcatcattcatttgcattttaataaaaatgtagcctttatataaattttcttttttttctgagtatttttcacctcttagttttttttcatattctttttcactaatggttgtatattcaaacttttttatttctttaaagtattgttctaatccttcggatttaattctgttttttaaaagttcaattgcattatcttctttgtttgaaatagttgaaatcatatatcatttaaaatctgtcatcatttcctttttataatcctactcctgctttatttcagagtaaagttgctatggttaatattatgaaaaataaaatagttgcaataaaaacgaaaattaacactttgaaataatttttagctaaatatgaacctgatggtcattttactctttttaattctttaaaaaagtgtctaattcaatatttttttggtttatttttcttgtttttgttttttaacataaataaaactttctaactatctatttttcttctttgtgtgttgtactagaattacattttttacaaaacttttttaaaataagtctttcatcagaagatttatttatattgtagtttttacttttgcattctatacaactaagtgaaacttttgtttttggcattattgcattataacaaaaaaaattaagttataaaattataatacataagcttgaattttcttttcaaatttttttaaaatattatttattttaaacgaactcatattagtttttaaagaaatttgtttagttttaaagccttcaaaaaaataatatactaaaacgctaagttctaaatcatctttaatttgaaattttgtctgtagtcactctttaggttcttcttgataattgaagttgtttaaaaaaatagtggaatttggatcttctatttctatttcttcaaatgtataatttaaagctaaatttaaaacttgatgtgactttgtagtaaattttttacaataattaatcattaaatattttactttataaaacaagtatttttcataacaatggttaaattttttatcatagtcttctactatttgaggcaaatagaaaagactgtaatttattaaatcatctaaatttaaaggtacattattaaaaagtctaattacgtttttagcacaaattgtaaaaatttctttatgctgatagtaagttttggaaattattttatttcttcgttttgtgttcaaaaaccttgatttcacctcctactttttaaaaagaataattcctgccgctactgaaacattcaaagactgaacagttccttgcattggaatataaaaggtttcatcagattgatttaataaagatttggaaacacctttagcttcagaacctaaaacaatagctgttggaagattaaaattaatagtttctattgatttggcttgttttgtaagagctgaagaatatattcaaaaattacgtttttttaacttgtcaatggttgctaataatgaatttacttgtacaaatttaatccctacaaatccgcctgatgatattcgaattacggtttcattaattttggcgcaattatcttttggcaaaataatatgttttattcctgctgcgtttgcgcttcgaataattgctcctaaattatgattgtcttgaatatgatctaaaatcaaaatcctttcgggattatctttaaatatagactcgatagggaaatatttaacattttctacttcagcaacaaaaccttgatggtttattccttttgctaatttgtctaaaaaagttttttctactatttttacttcaaatttttttaaatctatatcaactaaaggttttgctaaataaatttttttgattggtatattgttttttatcgcgtctaacaaagaattcttgccgcaaatgtatttaaccataatttgataacctcttttataaaatgtaaaaatttaggaaaaaatgaacttttttcatagtttttctctaattttgtctgcttgttggtaattttcttgtgcttttaatttttctcatctagcaactaataattcatctgttttagtcaatgttttttgtacaaaaataaagcctaaagtctttaaaataaaggataaatttgcaaagtctttatttttaagaagcaaatttaattctttatttgcttgagcaaaactagattctaaaaataacttcaaaattggatttactatatttttatagacttttttaggttttaataaatgttcaaaataagcttttttgtattgaattatcttgtttttgttagcttctaataattctgttgttaaatttataggacctgaaatcgaactagttaataaaatgtggcgataaatatcaggactatattgttttaaaaactcatctactaaaaaaacattatttaatgatttagacatcttttcgttgttaatttttatttgtccaacatgaactcatttttttgtaataggcttcttagttaaagcaaaatgttgagcattttcattttcatgatgaggaaaaattaaatcaattccccctgagtgaatatctattgtttgtttattaaaatacttataaattaaagctgaacattctgtgtgtcaacctggacgacctaaacctaattttgaaaaatatttaataccttcagtagttttttttcataaaacaaaatcgtttgctttggatttatgctttgtttttgaagaagattttaaagcttctatgttttgtcctgaaatatttccataattttttactttagaagtatcaaaatataaatcatcattttcttgataggtaaatccttgattttgaagcaaataaatgtaatttttaatagtatttaactcatttgtgacttttacaatttttgttggtttttctatgttaaaaatttttaacttctttatataatctttataataaaattcagaaattttactctctgttgtgttttcttttaaagctttttggataattttgtcatcaatattagttatgttatggagaaaaaatacttcatatttaaagtattttttaactctgtttaaaatatcaatagttaaaataggtcgtaagtttccgatgtgaatataatcgtaaactgtaggtccacaaacgtaaatgttttcttttttagtcatattggttcttctttaattttcttttaatttctaaataatctggtttatattttgctactatgcttcaaaatttttgactgtgatttgtttggtaataatgcgttagttcgtgaacaataatgtagtcaattgtatttctactaaatgggaataatttttttgaaaaataaatttttctttttgttatgtgattagttgcccaagtgcttgttttatcacgcaaaattacttcaaaatcaggagtatgcattatttgtactcagtatgatattcttgtttttatatattctaaaagttttttgttgatattatcaataatttgtaattttaatgtgtttttgttgtgtgatttaatcttaaaaacaaaattttttgcatataaataatattcattattagtttttactaaatcaaaatcatatttttgacctaaaaaataaaagtatttttcttgtaaattaattggactaacattggaagcattctcaagtaaatgatcaattttaggctttaaaatcaacaaattttcttgaattttattcaaaggaaaatttgtataaacttttaattttccttgttctaaacgaacactaaatttaaggtttttatattttttttgcacaacaacaacttcatagtgttttccattgtgaatgtagctaaaattattgttcattttttatactttttttaatttttttaagattagttttggaattatcaatacattgttcaatggaataaaaaattcgtttttgatctaatatactaatttcataattagtgtgttgttgcataagtaagtccaatttaaacatcatatctgattcaaaagtcattagtgtatcatcttgataatcaaagtagttagtgatatctaaagactttgtttttgaagaaaaaataattaaagaaagaaaaggaacaggcatattcaaaagtttttgtagcttaattatatgcattttattttgaaatactggactgtaaatttttaattgatgattaaagctggttttggttcaataatttgagtaaaaatcacctttaataaagccatttaatgacttgatttcaattacaattacagcttttttagtaattaaaatactatcaacttcaaataataaattatctttttttaatattgaagaattaatgaaaaaactttgattattaatagctcattgtagtagcttttcatttacttgtttttcatactcttttcctttatttttctttagaattttggtttgaagtgctttgaatctgaagaataaaaaaattaaaaaaaatattaataaagacaacaaacccaatgtactaccaagaataaaaccagtttgattatccatcattttccttcattttctttgtaatttgaatttcaagtacattgtgtgatttatcaagaattttaaagtaaagatcgtaatttagttcattttgttcatatttgaatttcaaacttttaattaatttttgtttactatgatgttctaaccaaagatctatagtattaaaagatgattctaaattaacttcaagttgttcgtttattgtagtaatttttgttctgttatttactataatagaatcttcagaaatttgataatattctaaaccatctcgaaaatcgtattcatcgtaaataggacctactaatgtttcaaggatatcttctagagtaataattcctattatgttttctgattttttagtttttttaataaaaccaaattgtgatttactctttttaagcttttcatagttgttttttaacaagtcatttgccgataaaaaaggtacttgaattatataatcatctatttgaaaatcctttaaaaagaaaagatctttgatgagtaaaattcctataaattttcctttttttctaacaggaatccttgaaaatcttgactctttaaagatatcaagaatttctgataaattcatattataatcaacaaaaacaacatcttttattggtgtaaaacagttgattgtcttgatagagtcaaaatctaatgctttaattgcaaggtcagattcttctttttcaagcacgccttcatgttttccttgttcaattatttttttgagttctttttcagtattggttattgcattttctttaaaaatcttagctaaaacaaatgttattggataaaacaaatagtaaaaaactgcaattattattcaagaaaatcttaaaaacttaatcgggtgttttcttgctattaactttggaaaaagttcaccaaataaaactattattggtgttgttactaaaatagaaactatcagtctcaaagattcataagtgataaatgcacctaaaagtgttgacaaaacgatggataaacctatgtttactatattattacaaattagtataactgtaaaggtttgtgaaaaattataaaacttatgtagaattgatctttttactattgattctgtttttaaattctcttctaatttagctttagaaacactagcgtatgctgtttctgaagcagaaaataaagcagaaaaaataactaaaagtaaattaagaataattaaaactattaaataactactctccataatcatccttgttatagttagaatcttcgttgtattctttttcaaagaaatttccatttgaaggatcaaatttcattgttattgaaccaatagctccatttctatgttttgcaattataagagtagaatcttgaacttcagaaggtggaagttgtttggtatagtaattatcacgatataaaaacataacaatgtcagcatcttgttctatagaaccagattctcttaaatctgaaagttgtggaatctttttctctcttttttcaacctctcttgaaagttgtgaaagcgcaataattggtgtatctaattcacgagctaattgctttaatttccttgaaattatagacacttctacttgtctgctttcatttctagaattagagctgtagttaataagttggagataatcgatgataattaaatcaatttcttctttttttctttttaatctttgcaattttcaaatcatctcgtttagtttaatagttcctgaatcttcgatcaagagattgtaattgttgattttgttatcaatcgcactacttattctaattcactgttctttgtttatataacgagggtctttgaacaaattagcatcaatcatagtttctaatgataataaacgagtaactaattgctgtgaagacatttctaaagagaaaaatactacatttttcttcgcatcacaagcatttttagctaaatttaaagcaaaagcagtttttcccatagaaggacgagcagctaaaattattaaatcacctttttgaaaaccagaggtttttctatttaattcttcaaatcctgtagtgattcctttaaggtctaaactattttgttggtgacgtaaagttagtaaaagttcttcagcaacttttgctacattatcaaaatcgtgtttagcattaatagaaacaatttgattcatttggtcttgaaattcatcgattatttcttcactaggtttgtttccttgtaaaatttctttttcagattggcgaaaaacttcagttatttttcttaatttagtagcctcagaaatttttttaatatactcaatgatttcaatgtcaacaagatattcatcgagtgaaagttctaaaatgtatttttcaccaccagcttgttctaatttattagttcttgttagttcatttattagtaaatttgtatcaaaagttcttgaattttccatcaaatttgacaaggcttcgaagataattcgtaatttaggcacactaaaatcttctatagataaataattaactatattaattcattcattaggataatataaaatataagatattattttctgttcaagatctggttctgatagcctagaatatttactcatcttttagaacctttattctcaagttagcacttacttcatgtgataatttaacttttaaaattgtaagtcctaaagaggtaatatgcactttttctactgtatgtttttcaaggtgtaaacctttttcttcaagcgctttaaatacttgttttgtagaaattgaaccatgtggttggtcatttgtaaattttaatttaaattctaaaataagagcttgaatttgttcttttaaaagaagatcttgttgatgtttttcttcttttttctttgcaatttcattttgtctttggtctaatgctttgatgtgttcttctacataaggaactgcgattttgtttttaaataagtaatttgaagcatatcctggacttacttcaattactgtatttgcttttccatcttttgagtctttaattaatattactttcattattttctccctgttattgcatttatgacgttgtctttaaattctaaaaaactttctgaggttgattgagctgctgctgctgaaaaatgtcctccacctcctactaattctgctatgtgttgtacattcgtatctggaagtgatctagcagacattttataaacatttgcatttggtaatttagctattacaaaaactgcttttcttttataaatatttaataaataatctgttgctattgaaattaaatctgattcaattggtttatcaatagctgctaaaaaatatcctggttttacttcttctaaattcttaattacctcattaattatagtaaaatcttcctcggaaatttttaaaatattaatagcttcttctgctgatgcacctcaattagataaaatacttgctgcattaaaagttttagatgatgatgattttttaaactgtactgtgtccatataaataccatttaaaagcatttgtgcaacgattggtggaatgtttttatcatcataagaatttaaggcaataaattctgtaatgatttcacaagttgatgaagctaaagtgtcaatataatcgttaccataagttaaaaaatctggttttcctgaagtaactccatgatgatcaaaaataaatatgttgtctttgttgatgtttttaaaggcatcaggattttcaattctagctttttctgctgtatcaagcaggataactaaagtatttgaatcatttaatagtgtagctttttttggcttgataaaaatcttcttgtcaatcttatctttttgaagacttaaaaatcttctaactgttgcatcaaaagtatcattttgaatataaaagtctttattataaagcttaaattctcttttggcataatctactaaaaaccaacctaaagcataagctgcacctaaagcatctaaatctgcgtttatatgtccatataaaattatttttttaatatcttctgaagctagctttttaagtaattttttagaaacataatttaaattagttcttgaagtagtaacactaatttggctatttctaccataagaaaaaggtttaaaaccgtattttattatagtggtttgatttcctcctcttgtttttgaaaagttaagagcttcttttgctagcttgtttaagatcttaaaatccttgattccgaaagcaaatccagttgaaatagttatatttagattagtatttgattcaatttgtgttttttctacaagatgtttttggaaaatatcaaaattatattgttgccattcttgaaaagtagcataatttaaaactattaaaaatttaccattgatatattgcctataagtaaaatcatattcaagcaacaagttttcaaaaaagacattgattttgttttgaattgagaacatttcatcttcgtttaatatagaagaaaaaacttgaaaattatcaaactcaatttcaccaattactcaagaatcatcgttgtattttgatgtaatggaatcgagcaaagtaatgtctctaattgatagccaattattagatgtattaatttgaacacttaaatgattatctcccattgaaaaattaaatttagaaggtaataagaagaaatttcgataattttcaccttcaaataaaacatcaactggtttacctattaaagttttttgatacagattaagaatatattctgaagctcaaactatttttccatctgttgaaaaaacaacaactcccattccattttctgataaaacgttttcaaaatgcttataaaaaaagttgttaacattaattgatcttttataaaaataaaagataactatgaaaaaaattccaattaatatcaaaattaaaaatattaatattgtaaaaaaagcagagtttgtaatttctgatttataaaaaataagcagaacaaatcaaattattaaaataggaaaaactgctaaaaataaaaataatcaattttttgaaattttcatatttttccttcatttttatattaattttatggaattaatattattttactaccaaagtaacaattttattttctacgtaaatttctttgataattactttattttctatatattttaagacattttcgttattttttgctttttgtaaaatgtcttctttagtatctgtatctaatttttctattacagctcttaattttccgtttacttgaactgcgatgttaatagtattttgtaaaatttttgtttcatcaaaacttggtcatttttgtaaatgaattggcttttcgccaagctgacttaatagttcttctgaaatgtgtggagcaaaagtagaaaacataattaaaaaatcaactaaatatttttttgaatttaaaatttcttgtttataaaggctgttgatatagaccatcattttagaaattgcaatgttatatttaagtgattctatgttttctgtaatttctttaatgctttggtgatacacagattcaaactctggatttgaataatttgcttcaaaaatgaaggatttttgcataattcttactattctatccactcattttttaatgccttgaattccttctacacttcaagcttttgtatctgtaagtggtgacataaacattaaataaagccttaaagaatcggcaccgaattgatcaataacatcatttggattaattatgtttcccttagatttggacattttttgaccatcagttcctaaaatcattccttgatttactactttataaaacggttcttttgtaggaactaattttaagtcatataaaaatttatatcaaaaacgagaataaattaagtgtcctacagcatgttcttgtccaccaatatataaatctaccggcattcatttttcaaatcttttgtatgcttctttagactctatatctaaataagttccatcaggattttttaaaatgtaagctaaaaaatatcaagatgaaccagctcactgaggcattgtattagtttctcttctatattttttgccttctttttcaaagaaaactcaagatttattgtttgctaaaggagattgtccatcacctgaaggagtaatattttccatataaggaagctctactaatttttcttctaaataaatttttccttcttcatcaaagtaaattggaaagggttctcctcaatatctttgtctagaaaatactcaatcttttattttaaaagcttcaacttgtcttgattttccttcatttttcaagtcaaaatggatatgagctcttgcttgcttaatagttaaaccattatattgattggaatttattaatttatctttgttattaataacttcaataaaattaatgttatgtaacaaagcaaagtctttatctctttcatcatgagctggcacacccattagtgcaccagtttgataattagcaattacataatcacaaataaaaataggaatttttttgttgtttacaggatttattgcgaataaattagtgtttattcctgtttttgcattgtttttttgtttttctctagctgcaaaattttcaacaaatacttttatttcttcatttttctttgctagctcttctgctaatcagtgatttggagaaatagctaaaaatgtagcaccaaaaatagtttctaatcttgttgtgaaaatattgatttttttacttgaattatctattaagaattcaacatttcaacctaaagatcttcctattcaattttcttgtaaagcctttaaagaagaaggaaaattcactaaatccaagtcttttaataatctatttgcatacttagtaattttaagaactcattgcttcatttttttaggatatactaaaaaaccaccacgttcacttactaattgtccttcttcgtttacaagcacttcttcattggctaaaactgttgctaactcaggacatcaatttacttccacatttcgaatttctgccaaattatgcttgtataataaagcaaaaattttctgagtttgttcataaaacaaaggattggtagtatctacttctttatctcaatcataagaaaaaccaagagatactaactgttttttgaagtttttaatattctcttgagtaaattttgctgggtgatttcctgtgtttaatgcatactgttctgctggtaaaccaaaagcatctcaaccaattggatgaagaacatcaaagctatttaatcttttaaatctagcaacaatgtcagtagcagtataacctaagggatgcccaatatgcaaacctgctcctgatggatatggaaacatatcaagaacgtaaaatttttgattatgtttgtctgtggtttgaaatactttattttcttgtcaatatttttgtcatttttgttctatttttagatgatcatacatagttttaaaattttactatatttttatttttatataagtttatgcgtttttttatggcttgattaattaaaaaaattattatttataaaacattaaaaaagtataatttttagttgaaaaagaaaggaaaaaatgaaaattcaaaatttttttaacaaagatttaatttttattaatgaagaaataaagaacaaaaatgaagcactttattttctgggcaaaaaattaaaatctttaaaatttattgaaaatttttcaacaacattctctgaatttactaaaagagaagagcaagtttcaacctatttaggtgattttattgcaatgcctcatattagagacaaaaatgttgtcaaaaattcaatagtttttattaaaaataaaaaagaaattagttgaaataataaagaaaatgaagaacctgttaaatttatttttgctattgccttaaatgatgaacaagaagcttcattacatattcaaataattgaagctctgtctaaaatgtatatgcaacaagagtttttaattcagttagaaaatgtacaatcacaagaagaatttttagctttaattaattcattttctgaagaagagaaagaagaaaaagaagaaaatttgaacaaaaaaattgacattgttgctgttacttcttgcccaacaggtattgctcatacatatttagcaaaaactaatttagaagaggcagcaaaggaattgggaataaacatcaaagtagaaactcaaggtgctgatggtattcaaaataaattaactaatttcgaacttaaaagtgcaaaaggtttaattattgcaagtgatagagaaattgataaatctagatttgtacatcttgataatgtattggaaatttcagctaaaaaagctattcataatgcaaaagaacaaattcaaaaagtacttgaaaataaaggaaaacaattaaaaattgcttcagaaaacaaagaaaaatctgtagaaaatgaagcacaaatgtcttttgtagattttcataaaagaatgtatagatctttattatcaggtatttcatatatgctaccatttatagtttttggtggaattataattgcttttgcttttatcttagatttaatcattggtgcatcttatggaagaaatttagatgcccctgagtttttaaaatcatttggtagcaattatgcattttccaacttaattttgagtattggaaaaatcggaatgtctttggcagtttcaattctagctgcttttattagtttttctcttgtaggaagacaaggcttacttccgggttttgtaattggagcaattgcaagcggacaattagctggctcatattcgtttttagcttcaacgttagaaaattcatatgaattaacaccagatagtattttatctactggttctggcttcattggggcaatttttggtggattttttgctgctactatggttattgtttttaataacttcattttaaaaggattgtcaaaaaatttacaaggtattaaaaatattttactaattcctttattagcaacttttacaattgccttattattttgagcattaaatatcattttaatttatgttaattttggtcttactattttcttatcaattctagaatctaaaacttacttagtatgacttctaggtcttgtaattggagcaatgatggcatttgatttaggaggacctgtaaacaaagcagcttatatttttgcaacatttacagtttcacaaaaaggggcttcttctatttcaatggcagctgctatgttagctggaatgattcctccattaggaatatctctttcaatgtttgtaaataaaaaattatgaacagaagagcaaataaatgctggaaaaatttcaaatataatttttggtctttcctttatatcagaaggagctattccttatacagccaacaaaccaaaagtgctttttccttctaatataattgcaggtattgtaacaggaattacctcagctttattaggaatcaatatcatcgctcctcatggtggaatatttgttgtctttttagcaagaacaaatttagttgaatctgcaggagcacaaattggtttaggaattttgttctgaatcttggtattaatactgggaactattactcacgcattttgtatttgattcttttcaaaaatacaaaaaacaggttgagattttaaaaatatcttcaaaaaagaagcaaaatagaaaattttactcattaaaaaaaccagtttctaattaattagaaactggtttttttaatcattaattatttttaaattttaaaaatcaaaactacttaaaagcatgaataacaaagtgtgattattgtattattcggttgattgatcatattgttgcttttgataataataaagaattaattttttagaatttgaaagttttacaagaccaattattacaaatataaatgcaataatagatcaaataaaaataactcctcaaattaaactataataagaaaaacgaagatctttttgtatgtcataaagtattaaagtctttgtatcattgtttcctgaaacaacatagatttgtattaaattaagcaagtttttaatgtttactaataataaaattcaaactactaaaaagcctataaccaacaatattaaaataataattaaagctatattatcaggtgaagaagcacgtgaaataattaaaaaaatagaacctataataaatataatgatacttattaacttgaattttcttatattcttaatagtctgatataaattatcttcattatctaaaatcatagtatttaattatatcaaatcgttttaaaatgtcttgaatttgcataatttgaataaaaaattatttaaatttcgattttttgctacaaaatcaaaaaaaaaaaaaaaaagcatataatacgacaactatgaaaaaaattattacttatttaggtgctattgcaacaatagcaacaccatcacttattttactttcttgttcacaaaaagatgaaatagaaactaaatttgatgaaattattaatgtacttcaaactcaattagataaaagcggtaatgaacaacttaaacaagcacttaatactcaaatacaaacatacagaaaccaaatcaaaagccaaagatctacatgatcttcactttcaaaagaagaaagagctgcaataattcaacaactagaagcaactaaaataacattaaaaactctatacaacatcgctaactaattgtaaatttatttaaaaaaacaaagcattaattgtgaggtggtacccttttcttcaaaaaatttttgagtgttttaattaattataatttgaaatgaatgtttccctaaacttaataggagacattcattttattttgtctttaattcgtttgtgattgtaataataaatataatttgcaattgctttgtgaagttgtttaaaagttaaaaattctttttcgcgaccataaaaacattctctttttaatgttccaaaaaacgattcaataacgctattatctaaacaatttccttttcgggacatggactgaattattcctttttgttttaatttttctgagaattgtctatgttgatactgtcaaccttgatcactgtgaaaaattaaaccttcaagatttttgtgttttgaaaatgctttttgaagcatttttctaatttgttggttgttagcgcttgtagacaaatctcaagcaataacttcacctttaaacatatctaaaattggtgataaatatgcttttccaaatggtccgctaaattctgttatgtctgtagttcatttttgatttggttgagttgcgacaaaatttctatttaaaatattgtctacaattttgccaacacttcctttgtaagatttgtattttcttcagaacaaattgctttgagattgaattttgccattaatctgcgaacttttttaattccaattttatagcctctattattaagttcagcttttattcttctttttccatatcttgctttattttctttaaaaataagcttcatttggcttataatttcttcatttttcttgtcaaaatcttcttttttgagttcataataaaaagtagatataggaatagaaaactcttttaatacttgagttaagcgaaggtttttgtcagcttttactatattataaatgttttttattttttcttgccttggttgatttgagtcaaagatctctaccaaggcttttcacttttttagtgcttcattttccttttttaaaagtttaatttctttttcaaagtttttttctctttttttaaaatgcttgagttcttctctaagaagtttcagttcttcatatacagataatgaagaatttgattgatcttgactatcggaattgtttgatatttttgtagatttattattattaatcttagatttcattattggtcttcctttgtttaattctaagccactaatccctgattctaaatattttttggttcaaaaagatatttgacttggattaagattattttcaagtgaaattttaacaattggttcactagctaaaaatcttttaactatgtttaatctttgatctatagttcactttttatttcgtggttttttcttaagtccttcaactcctaatttgttataaataatttacttgatttaaaaaaattttttaacttgtatttgcaaaatcgggctttttaatttcaattcctttttatatttttttacacattctaatttaaattctaatgattatttcataaaaaatctccttttctatttttctaagaaaagaggatctgctcatttttcaagcatttttttatttacatattaatatctgttgtttctttttttagaattttttttattagcaggtactctgttgttttgtggatatccggcattgtgttggtagctattattttgagaatagttattatcttggtaatcatcttcatattgagagttgtagtaattttgttggtaattgttttgttgagatgaaaattgtatcattaataaagtttttgtagcagaagccactttaaataaagaaactaaaaccaaaataccaaaaagtgtcaaaatagccccaactaaaggaattcacataaatataaacattttggaagcaaaatttaattttttatatgcatcatacataataaaagatgagctagaattttgtgaattcataactgctgggtatataagattttttaaagaaattgttctgactgttagaacaatgacagtaatagatcctgcaaaaccgattaaaatggcaaatactaaaaaacctataaatgcaggttcaaatagataaggtgaatcatatgaagtcgagtcattagttaataataaaaaactattaacatatttttgtacaactggtaatgcaattgtaaaaaataaaataaaaagaattataaataaaattagacagattcagtaaaatctaagggtatttctaagtgctttggtttttaaaaaaatcagtgattgaaaatccataataatgttattttacataattataaaaatttttagtatttcttgtacaaaaagtgcgttttgtctttaaatgttatttaataaaaacaatatttattaaaaagtaaataatataagcatatattcatttgtggcttattatttgaatgtatattaagttgtctattataaattgtttcttttaaagtaataacaatccttcaaaaatgaaggatttttaaagtttttttgcaaaaaatgtatcaaaaaaaaaaaaaaaaaggatatttgtataaaattcttccttgtatagattcaactatacatttttgtattttaaaaaaggaaaaatatgttaaaaaataaaacaatatttaaacaattattcattagcacaattgcgtttgttcctttagtagctttggtatcttgtggagagacaaaaaaagaagcaccaatagttaaaggtggatctgatactcaacaacaaccaggtgttcaagttactgacccaaaaaaagaagaagcgcaaaatagatataatacaattaatactgaatatgaatacattaaaaatgaaaaattaaaagaaggaactgatccactaattaaaagtgctttagacactttattgcctaaaattaaagaaattttagaaaaagataaatttgattctgtaagggcgcaaacatatttagacgttgtaaaagatagacttgcgaaattcaaagaagctattaaataatatgtaaaataaaaaagagcaaaaatgctctttttttaataacttcaattattggtaatcttaaattatatggcgcgcctggaaggactcgaaccctcaacctcttgggccgtaaccaaacactctatccaattgagctacaagcgcatggaggcaccaaccggactcgaaccggtaatcaaggtgttgcagacctatgccttaccatttggctatggtgccattaaagtaataaaattttactatatttttcattatattatagtaaatttaattacttaatttattatttatctatttttaatcttaatatatttgatttataaaatatgactttggctttatttttgaagtaatcatatgaattatttaaacttacaactaatttagctgttttttctaagatttctttgttatatatattttctttgtgatattttaaagtttctaaatacttgtttaaattaattaagtcaaattctaaaatatatatattttctagttttaaatcgcaaatatttttgttagtaaccactaaactagcagcattataataagagcgcgttagtaaattaagacctaattgtgcattagatttatatcttgcaattattatcaaaatattaaacaaattgtgtgtaaaaattacatcacgaatcttttttcctgaactagatttaggttctgttgattcaaaaaatttcgtttgattatttaataatctataggcataaactatatgttttgctttattttctttttgtttgataagagataaatataaagcaatttgttcttcattttcaacataaaaactataaacaaaaaacttagattccttgacttcaaagagatattcttgcttgtcgaaacagcaacttttttgcattatttgctttaaaaatgaagaaaaattagtttaatttttgaattcctgatgaaggctgaatatctcatttttcaggtttagataaaagtcctgaatttgtaggcacattatttacttctccttcttttcagcctacatttttccctctaacaaagttagctttagacccatcatctagtattcattcaggtgggattctgaaataagctgaattaatataaaatctatataaggagactcattttggttgcaagtcttttaagaatgtaattctaatttttttaatgtttattccttcaacaaaactaaattttcatacccagtaattatttttttgatctttgtgattttcaggttgttgaacttctaattgctctgctcgttctgttccatttttgtaataaattatttcaactttaaaatatttagttaaattatttacgtttgtataatctggattattaaatgctgaaaaagcaaaatcttttacaaaaacagcttgtctttgagcttgcagttcaaattctatatttcatggttttttatctgaatatcaataatctttagatttattataagttgcttgtgctattgtataaaaaggagaatatggttttcaaagatattctgaagtatctgttgcttttgccactcaattatcatctaaagctgtatctaaaattactttatttaaaccagtaatttctaaagtgtgtttttgttgttgacctcaataagtgatggtgtattctaattgcagagttcctttttcttgatttattgaatctggaacgactcttagactatctttaatgagttttttatcttctgtaggtaaaatattttcaaaacgttttttgtttgctaatctagcagtatataccttgttaattttatttaaattggagttaattcttgcagttaaatatttaaaggtatatacataaaatgaagaaactgaaggatttacattaactctggaaacaagattgttgtcttcatattccacaaacttcaaagtatatcttccacctttatcagataatgacttgatggttgattgaaatttagaagtttttggatcataagttatgctattgttattttttccatttgctactttagtttcacctgcatctgaagtataaataaatctgactttattaacatcaaaaattgttaaattgtttttagtagtcattttaaattcggctgttgcaggtattaattgagttgcttctttgacttcgaatttaatagcaaagttagaagataatgtttcttgttggaagtcaacatcttcttcaactattcgatcagtttgagctaattgcaattgagattttattggggttgttgattgattattcaaagattttgaaagtaatcttgtaatttttgcaatcttgtaatttttgttaacttttagattttgtaaagaaaaatcaagtatttttttgttatctgatccgttattggttagtgttgcaatggaagttaatagtgaattgttgttgtttttagctgaagcaggtttgtaataaattttgaatttttcatcaacttcaaaaacattataatcgtctaagagttccatttgtgctttaatttctgttagagaaactgaattaattttaaagttagtaaattctttatatgttgataaactatcgttaactgtagacggagctgattctacacttttataaatggaattgtcttttggatcaataattgcaatttgttctaaatcatattgttgatttgcatcaatatttttaatatcaaaagaatatgaagtaattccttcaataatttttagctcttgtgtttttaaataaacatctttatcatttttatatcaaacttgtaaagatttattttccatatttttagaaacatatggtagttgaacattaactttgtaataaattttattattctgatcaaatagtttttgtgaggagtacttaatatctaagtttccttctttagttgtgaaaaacttaatgtcattgttgtttctattgaagaaaacttgagtattttttttatctatagtttgaggtggaatctttgtaaatgctatattatcaattgtatattttgtatagtttagtaagtcattaaagtcaaaagttgcttcaaattttccttctttttcttctatttttgtaaaatatttgttctttttgaactcttgatctttatcataataactaagttctaaactaatttcttgaccatttgataaactctgatctttggtaaaaagttcaaagtttaaaattgcactattggctgtaatacctttagcaactgaatcgtcaaataaaatttctacgccagaagataaaacttttggtctaatttttctaagtgaataatgaactttgtaaagatcatctaaaactggtgtttgattttgatcaaaaacattaaaagaactaaaactatattgtctgttagtaattaaatctgcaaagtgaaatcttaaattttctgatgttatttttgttgttgcagtaatttcttctttattgttagatactaaaaccaatttagctatttttcctaataagttttctttgtttgtaatatttaaaacaatatcaaaagtatctgaagtaatcggggtacttgctatatcacctaaataaactacatcactagtacttaaacttactaatttggcgtcgttattgacttctaaattatcttctttttctgaagtatttgacgtgtttttgtttaaggattcgttaatttcaaaaatatatttgttttttggaattgctaaatttacaactgattttgctctttcgatatcatcaccatcaattataattttagaaattctatacttatgattatctggcaaatctttaaaactaaatgtaaaaatttttttaagcacatctagttgttgtacttctgaaataaaaggtttttgatcatcagaaattaaaactaatctaacaggttttttgtttaaatccaaagaaattttattaatcttaatttgcacatctggatctgaatgttcaactattggtgttagtgagctggttaatttgtttttgtcttgaatttcaaggttatcaatattgattggcaagagttcattattttgtgttttttgtgaaatagatttaatcaatttaaaatcatcaaggtcagaaacttctattttagcttgtcctttactgtcagttcttaaattaatttttttactttttccttttccatcgtcaagttctacttcaatacttttatgtgcagaaaaggcaggatctagactaataatatgttgatcttcatcatatttaggaacactaaaaactattgtcttggctttatcagtccaaacaactctgtttttgtcatttataatttctcttaacttagaatacttagtatctttggaaagtattaattgattatttgttggaactaagctaacttcttcaattgtttggtttttatctacttcaaaaattgctgtatatttttttgaagatttcattactttaggtatgttaaaaattacagcctgattaccttgtttatcataggtaaatgactgaatttctaaggtagcttttttctctaccgctgttttataaccgtatcaagctcctgttcctccaagaactgcaacaacaatcgcagaagctattgttatacctaaaataatttttataaccagtttttttttcaatttttagtgcctctctgtaaaagaaaaattaaatgttatataacataattttataaaatttttgcaaattttaatataaataaagaaaaaattatgaaaaaataaagaaattttactaattttgtggcaagtctttttcaggttgaatgaatcttattttaaaaatagaaacatatttaggttggaattcttttttaaaggtaatttctatttttttaatttgtgttaatttatctagagcgaaagatcacttgtagtaagtacttgttgttgtgatttgttgttctggttttctttgacgttgttgagttgttattgaagttttagttgtagcagtaaattctgttggactatttacatttaagtctttagttacttcttgatttttgtcatctgtataagttattttgacactaaaatatgaagttaaatggttttgagcagtataatccttgtcttttctagcagataatcagaactctttaattaaagtgtttttatcatcttttggagttattgtataagtaatgtctttttgatcagttgttttatctgcatatcagtagctgtaatagctatcattatctactaaagcaaatccaggatcaaaaaattctactgatgaagacgcttttgcatcaaatttatctttagagtcttttatttctactaatttattaaagtctttaattgtataagattgtgaagtggtagacccaaaataagaaaattggaaagaaacaggtaattctccttttttatcatctatagatctggaagtaatacttaaagatgaattgatgaattttttatcgttttcagtaagatttgcttctagtttttctttagttaccattgaaggaagataatttttgtttattttatttaaattttcttcaacagatttaattaagtcttgtttagatttaatatttaaagtctgtaaatttgaaactaaaatgctttgtttttctttatctttgttgttttttacaaaaatatctaatgatttaagttcatattttcctgtttgttctgataaaaaaggaacaaatagatttaatgtttttgaactttgttcatacattattttatcatcgttatttgtactattatcaacaactttttcagttgattttgcttcattttcctttgtaaataaataatttaaactaaaatctaaattgttgaaactatctaaattattttctgtagttaaagcaaattttcctgttttttcatctaatgtagatgctgaaagtattttaaatttaatttcaaagttcaatttcatttcagaatttttttctttatcataataaattaaactttcaaaagtttttaaattatctttattgtctgaagcaacttcaacatttctttctactttcacgatttcgtaattagtgtttaattctagtttaggaatttcgacttcaacaaatctttgctgagaagaattagtttggatttgagtagaaacagtttctacttttgcatttgaatcatttgtttttttgtaggaaataataagcggtgaatttgtagaaacatctttatagtcatcatcaatatttaatttaatttttactgaatttaacttagtttgtactacttcaaaatcagaaatattttcagtaaagttaaatgaatctgaaatatcatttttagctaaatcaatgtttgaaattaagtcgttttctgatttatcaaaaacgaaaattctagataatgtatactttgtgtttttctttaaattgtcaaagttgaattcatatcttgaaacagtatttgataaagtttgtggttgtgattttagtactttatcattgtcatatgtatattcaacttgtatttttttgttataaaaagagcttggtaatgaagtaaaagtaaggtctaatctatattttgaattattatcttttaactgttttaatccagttaattctaaattaatatctttagtggctgtttgaaaataaaaatcagaatttgaaggcacacttcaaaagggtttgttggctaaaagatcaaaatttttgtatggattttctgcaaacgataaactaactagttcgtattttgtagcttcttgtaaattttttgctacaaaatgaagaccataagtatttacatctttatattctatttctgaagaagctgaaaaataagttggattatcaggaggagaatctacttgtttaaatttagcttgaatctcttgtgttggatctaaacttaaaacatcagaaacaaaatctaaattaattgttgctgaagaaattgtctgtgaagttataaatttttctggttttttaacatcaataccttcaatatctgaaattactaacttaattttttcagtttcattgttgtttttagtagtaattttattaagagtaagatttaataaactaaataattcattatcagttaaatcgatttttgcttctttattagcctttttatttataacaatttctttaccttcagtgtttaacaaactaaagtttacagaagcatttttagaaatatttggattaagtaaaatggctttatttttaatgtcaatttgaccaagacttaaatcaattccttctttttctggagattttcaaatagtttttttactaatatcttgaatttccactaatctagaatcaggtgaagtgtttctgattgataaaatgttattatgagcaccaacaaactttcttattagtttacctttattatttttgaaaataactatgtaattaacatctgtgctttttttagctaattttagttgtgctagtggaactccatcattgtcataactaaatttaattacaggtgatgcaaaagatttatttttttgcacaccaaaatatgctccaagcgatactgaagttattgtaacagctgatactaaagataatgcaataataattggttttttcatttgtgattagttattcctatgtttttaaaaaatgatttttgcttcttttttcttcttttttcttcttttttcttctttttttcagtgtttatttagttataaagtttttgtagttttatctagtttagatataaaattatactaaaataaaaaaatattaaaagagcttctaaacaaaaagttcttttaatatctataaattttatgatttaggtgttgattttaaatcagaataacggaattttgtgttgacttctgttattttatctgtaaaaatagtagtgttatcaagttcaacataaactattccattataaatatcaaaaactttttgatcagctgatttgtctgagccaacaaataatttatctgcaactaatgaagcaacaaatggtgtttgtccgtgttgacaacctttatatccttctgttgttcttaatgtcactaaatctgtatcagtttctaaaaaaattcctgaaggtgtgattatttttaaatgagtttgcttcatttttaaagctttttagccttttctacagcttcttcaattgttccaatatataaaaaggcttcttccggaatttcatcatatttacctgataaaagttcagcaaaacttctaatggtgtcttctaatttcaagaattttccttgaattccagaaaatttttcagccacgaaaaatggttgtgataagaagtttctgattcttcttgctctggcaacaacttttttatcttcttcagataattcatctactcctaagattgcaataatatcttgtaattctttaaatctttgtaaggtttgaattacttgacgcgctacattataatgctcttgtccaacaattaaaggatctaaaattcttgaacctgaagctaacgggtcaactgcaggataaatacctaaagaagcaatatttctatctaaaaccgttttagcatctaagtgagaaaaggttgttgcaggcgctggatcggttaaatcatcggctggaacataaacggcttgtactgaagtaatagaaccgtgttttgttgaagtaattctttcttgtagttgtcccatttcagtagctaaagttggttgataacctacagttgaaggaattcttcctaataatgtagaaacttcggaaccagcttgtgtaaatctaaagatattgtctataaaaagaagaacatcttggttttcttgatctctaaagtattccgccattgtaagcgctgaaagagcaactctcatacgtgctcctggaggttcgttcatttgtccaaaaacaagcgctgttttatctagcactccagctgctttcatttcgtagtaaagatcgtttccttcacgagatctttcaccaactccggcaaaaactgaaagccctccgtgttgggttgcgacgttgttaattaattcttgaaccaaaacagtttttccaactccggcaccaccaaaaagtccaatttttcctcctttaacaaaaggaattagaaggtcaatgactttgattccagtaactagaatttctgatgaagctttttggtcaacataactaggagctggagcgtgaatttctcttaattgatcaaatttaggagctggtttttcatctattactttacctaaaacattgaacattctagataaaacttgacgtccaactggtacttgaatttgttttcctgtgtcaattacatcaagacctttgtaaagattataagtcatatccattgctatggttctaactgtatcgtctccaatgtgttgttcaacttcaagagttatttgctttatttttccatctttgtttgctggtaaattaactactaaagcgtttaaaatagcaggaagatgtgagtcgggaaaacgcacgtcaataactggacctagaatttgaattatttttccgatattttgtttttccataattttccttattttagtattgaaccaataatctctgtaatttcttgagttattgaagcttgtctagttctgtttaattcaatagataatttatctataatttcatttgcattatctgaagcattttccattgctattcttcttgaagctatctctgatattttagattcaaatagaaagttgtttaaagctgctccaaaatagataggaattaaattttttaaaactacttcagcattaggctcaaattctacttctagctttgaatttgcttcaatttgaagcttttgttgttcaatatttttatcaattggaagcattgtaaagttaactgcattaaaagttagagtattaataaattgggtatagataatttcaatgccagaaacttgtttattttctaaataattttgtatttgttctttaactttaaaaataatttctaaacgatctgctctatctacaacgttgaattctaaatcaatttgatctttgaatttttgtaaataagaacttccttttttaccaataacaataattctatcttgtttgtttatcaaggattttaacttcttaattacatttacattgtaagctccgcaaagacctaaatccgaagtaattactataaaaacttttggttttgtagaatctaaatcaaatacatcaactgaagaagtttttttaataattgataaaaatatttcgttaagatttgtaaaatactgtgaaacttgtagaaattctcttcgcattttgggtatttttgcatttgaaattagttccattgcttttgtgattttttcagtattttttatttgagcaaaacgagtttttaatttacttagtgaagccattttaatttgctgatttagctacaaatctttcgatgaagcctttaaaggaatcaattagtgaatcgtagcttttattatcaatagatttattatctaaaaaatactgtttttgcttcaaaatgaagacatctttgtttaaaaagtcaaaaaactcagtacggaattgaagtatttcttcaaccttaacagaatctaataatttttctttaataacaagtaaaatcattacttgattaaactgagcaaggtgctcatattggttttgctttaatagttcataaattttagttccgcgatctagaagtttttgtgatgcttcacctaagtcagaaccaaattgtgcaaaagctttaatttcgttatattgagctaattgtaatttaagtgaactagatgcttgtttcattcctttagtttgtgctgctgaacctacacgggatacagaaaatccaacgtctattgctggtttttgtcctgaattaaacaatgaatcacgcataaaaatttgtccatcagtaattgaaataacattagttggaatataagctgaaatatctcctgcttgagtttcaactataggcaatgctgtaatagaacctccaccagattctttgtttaattgtgaagctctttctaataaatatgagtgttgataaaaaatatctccaggaaaggcttcacgaccaggtggacgacgtagtaataaagacaatgttctataagcaattgcgtgttttgttaaatcatcataaattattaaaacatcattaccgttatacattcattcttctgcgatagaaactccaacgtaaggagctatatactgtaacggcgcaagttcagatgctgaagctacaacaacggttgtatactccatagcgccttcttttttaagtttgtttactatttgagcaattgtagagtttttttgtcctatagctacataaacacaacgaatgtttttgtgcttttgattcaaaatggtatctatagcaattgcggtttttcctgtttgacgatctccgataattaattctctttgtcctaaaccaattggtactaaagaatctatagctaaaatacctgtatttaatggacgatcaatggcttgacgagacattattgaaggagcttctgaaaaaatttgtcttctttttgtgaaggaaatttcgccattaccatcaattggttcacctaaagcattaactactctagatagcattccatcgccaactggagttgaaatagttaagttagttcttcttacttcatcaccttcagcaaccgcattttcattacccatgataactacaccaacatagtcttcttctaagtttagagcgattccataagtgttgtttttaaaagcaactaattcacctaattttactttgtcaataccatagacaatagcaactccatcacctactgtaatgacttttcctgtttctgaaattacatttttcttattgtatgtttcgatttggtgctttattatagcagaaatatcactggcttttaatggcatataaaaatcctttgttttattttaatatatcgcttttgatttggtttaaaagcgatgctacactattttcaaaaatatgattgtctataactatcttaattcctgctaataaatttttatctattcgatgttctacaattatatttttattgagtttttgagctagtaaattaacaattttatttatttggctagtgtgcattgggaaacctgaataaattattccacgagctatttttgaaatttcatctgcattttttgtaaatcttttaaaaattttttctcagtaaaaaatgagatttttgtcaattaatatttttaaaaaatttaaaactggttctgaaacttttttagtaaaaacactatcaagaatttcatgtctttgtgtttttgaattcatatgtgattttaaaaacgtgaataatgatggattatgaattaaaacattttcaatgtgaaaaaattgttcttgaaattctcttactttatccatctcttgcgctaattcaagcatagaatcagcataaactaaaatatttgaattgttttccatatttaaaaattatttttcaaattcttgtaattcaatgtctttaaataactcatcaattaattcttgttcatcttgataagtgatgtttttttctaaaatttttgatgctaaaactgtagctgttgaaataatttcttttttggtttcttgctctgctttttgttttaattgaagaacatagaattttccttcttcaactattctttttgattctgcttttgcattatttgtataagttgttgctatgttagcagcttgtatttttgctttggcaataatttcttgacgtgctaattttgcttctaaaagttctttatttttttcttctacaagttgtaaagatttttctttgttttctattgttgcatcaatgttatcttgtaaaaattttcttcttttttctatatttttcttcaaaggtttgtataaaaatttagaaagaattaagaataaaattgcaaaagacaaaacagttgctagcattattcaaggattaggaaataatcctttaaataatttatcaatatcttgacttagttcactttttgaagcaaagttagttacattttgtaaaatcataagttaaaaatttaaaataataattaagcaaaaacgaattgtaataagattgaaataactagtgaataaatagcagaagtttcagaaatagcagcaccaataatcataaatttaaaaactgttttttcactttctggatttctacctacagcttcgattgccttcgctgcagaaaccccttgaccaattccggcaccaattccacctatcatggctaaacctgcacctacacctactaatcctctaccaactgattcagttaaagctggttgagctgcagcagtattagctgcagtgtcagcaaatgtagtgattttttgtaataaagtgacaacgtgatctgtattcattataataattttcctttatattaatttaagttttttgtttaaaacttagaaaaattttattacttattctttaaaatgaaaataaaagctttatgcatttgcttttttgaaaaaaaatcttaaaccttttttatctttttttggcttaatttcttcacttatttctgtagatcaatatgttattgttaaaactgtaaaaataaatgattgaactaatgaaccaaaaacattaaaatagaaaataaatggcggatagactataatcgccggtacatttaaaacacctaatgcattatttgggattaaatgtcaaacgtaagatagtccatagtacataactaataaaattgctgaaccaccaataatatttccaaataacctaaaagatagagaaattaatggagcaggagctgataaagcatttagagggttaaaaatatattttttaatataacctattttgttgaaaataaatccaactacaaaaattcctgttcaagaaaccacaccaagcgttagtgtgactgataaagtcgatgctactgtttcaaaaccaaagactgaaagtaggttaccaaatgctaaaaaagtgaataaggtaaaaaaatatcttttcatcacatttagttttccttctgatatgtcttctactaaattatcaacaaataagaagtaatcttcagcaaataaaacaattgttggaggtactttatccactttgacttttttaatttgaaaataaattatcaacgaaagaataaaaactaaaaaaatcataatacacattgtaaaaagttgtggttgatttcagttggataaaaatttactactgtctaacattttctctcctttctttttttattttttttcactcacttacgataatagagattggaaaaagagaaattcctactaaaaatgtaaacaaatttattggtccagaaactttttgtataggagtttttatcatattagctggaaaatgaaggttaattactattagaattgctataaaaataatgtgaattattattaatatataaaataaactaattgcaacagcaacctttttaaattttttttgagattttttgactttgattaatattttattttcaaaaattcaagtaaaaaatatagaaaataaaacactaattaaagaaaaaaatcagcccactactaaatgataagaccaaaaaatacaaaaagaaaatattactaaacctattaaaaaaaatattaaataagtttttgttacacttttgtaaaactcatattttttcatcttaaaactcaatgagcaatataattttattccttttgtaaaaattagaaaatttttttattaaagtcattaatttttttatcaatttcataatcagcaagtgaactaatttgctctgttccaagttcttgatttaccttgttaattattttttttaccttgttatttgtttgtgattttttaatttttgcttcattttgttgtatatttgaaaaagtaattcctatacctcaaatatcatcaatgttgcttatttgatctagaaaaggaacaacttttgagtaaataaaatcaggattatcactaaaatattctaatttataattattttttatattttgttgattttttagtttgtaataaagttgaattttatttgtgtacaaatatttatcttgtaattttctgcaaagatcaaatataaagctttttattagaacataaattatttttgtgttcaaaatctcttcttttttgaagcttttaaagtgagaaatggatttaacttgatgacttagttctatatgatcatctcctttttgtagtagattttcaaagaaataaaatcttctagttcctaaaattttctttaacttttcatcttcaatattagtatttattaaatctgagatggtattaatattttcttgttttaattgtgttgataatgccttacctataccaaacaaatcggcaatatctagatgaaataatgcttcttttttgttctttttattaattaatttgaacgaaattccttctttttttgctaaattagtagccatttttgctaaaaatttgttataagaaatccctatagtaatcggtagttttaaatgttttcaaatttgatttttaatatcatttaacatactttctaaagtatgaaaataacgaaaataacttgttaaatctacgaagcattcatcaatggaaaaaacctctattttttttgagatattctttctaataaaggcaaaaaattctttagacaaaaaagaataataaacgtgatctggctcaatagttattaagtttggaatctttttttgtatactaaaaattttatcagttgttttaattccaagtttttttgcttgttttgacaatgacactgcaatagcatttgcttcttttctagctattgctatgggtttatctactaaactaggtactaatttttcttcagcagaaacaaaaaaattatttatatcaatatgagctattattttcattgttattattttaaaatatataaaaaaatagacaaataattgtctatttttgtaattttgattctattaaatctactacatcttttactgttttgacttttagtaattcttcgtcagttatttcgattttatatttttcctcaacgtctgtaattaactctacaaaatctaaagaatcaataccaattgaataaatatcatcatcatctttaaaacttttattagtaaatgatcttaatttatcataaattaattttttcatatgttaattatatattatctttttttaatttaaaatgataattttgtgaaacttcttcgtcttgatgaaatcaaacaaattcgataaaaatttcttgatctgtcttgattttatagttaaatttgatatctccataagaaattgttattttggaaattatatctttaacaaatgcagctactaacttttcgcctattttagcatggccattttcaatttcaattaaatcatagtagtcacttgcataaataataggaaatatatctttggcttctaatttagaatttgaaaataaagtatcatcatctgattttatttcagttttttgtttgtttttgataacaaaaaatgttgttaatgaagcaataatagctaaagaagtaatgactccgaggcttatgaacaatatttttttatttagttttagctttatcttcatttttagaaagttcttcattttcttctttaatataaagactttttagtacttctaaactcatttcattggaagagatgtacttaaaatttttattttctaaaataataaattgatcttgatctaaaaaagaatctttgtaggtttgaatatctaattttaaaagtccatttgttttgtctagaaatttatgctttatttcttgtctatgagctagagaaatatcgggataatctgcatttaaaaataaagttgaaattggatttaaataaccactaaaattatatgggattaaaaatccttgctttgattcattttgaattcccttaactattatttttttatccgaatcatagtaagtgttatttgcaattacaatatcaccaataatttttttacccaagacatattcagcgtttttatcttgtctgagtacaaaatgaagatctaaactttcgtttttatcaataggtaaattagtcagttttttaggtaaaattgacaaatctctatctagtgtattttcatcgtagacatcgttttcgattgctactttataaacaattttgttgtgttttcctacttctcatttaactgaaaaaaaataaatgttgttataaaactgtttttcaaattgagaatcaaatactttgttgtttttaactgcaaaagatgcaaaatttaatgttttaattgatttaaacacaattccttgagaattgataaaaaagtcttttttaaaaacaggatttttggagaattttatttggcttaaaatagctaaattttctttattttccttcttaatttctgaaactattgataaagcatttaattttgaaaaattaaatttatcaagagcaacaaaaggaaaaatactttcagcaaaattttctccaaaaatctttaaattattcacaatttcagtatctttattgttaatttgtaatttagaaatcagatcaatgttatttcttgaaaaataagttacttttacagaaaaagaatctaattttatattacgatttatttctatatattgtctatcatctgcacctgcaaaattagtaaatcttgtggtgttttctagatttgaatatatattaacagattgaatttgttcttcaatctgaacgctatgatctatactaaccatataaaaagtacagaaattgatctattgcttgatgaacacgtttgttgtaagttgtttttgatcagtaattatcttttcagtttttatccgattctaaaaactctttttgcagaataattacatgatgagggtctaataattttaaaattctttcaattgttgataattcagacatttctttttctaaatttgctaatgcattaccaatttttgattgattttcaagttttaacttgtcatcagcttttaaaaactgatattttttatgcatacaaaagattttcttcattatttcttttttctctacaaaagaaagttttcttattctgtctatggctgctcctttcacataaaattttgttaaaaaaggcagcaaaacttggaaaaaagaaaaaatttaggatttttaatgtaaaagttcctatttattattcaattttcagtcttaaaatataatttgggatttagtcaatattttcatttcaaacaaaaacatagtcatacactcttacagtatctccagttttaatgtttttgttgattaattcttctcaaactcctaaatattttagtttattattaaatctcaataaattatcatgagaatttaatggaatttttaaaaatatttttttgatttcatcaccaaaaatattaaagacatttccaggtaagatttcgatttcaaacggaggatttagttttatttctacttcattttgtgtttcagtttcataaacgttgtttttcgaattttctacaatttttaataattcttgttttagtaaagaaatattatgtttttcaagagcagaaatttcaacaatttttaaattaggataaactcttttaaactcttgtaaatgcttcttaaatgaaggtaaatcgtttttatttgctactattacttgttcaacttcttttaatttttcattaaatttaaacaattcattattaataagttcaaaatctaaaattggatctttatcttcagaaccaaagtctataatatgggcaatagctttgcatctttcaatgtgttttaaaaacacaaaaccaagaccttttcctaaagaagcaccctgtattaaaccgggtaaatctgcgactacaaatgatttatcaaaatattttacaagtccaagttgaggtactaatgttgtaaattcataatctgctatttttggttttgcgtttgaaattgcttctaaaactgttgattttccagctgatggttttcctacaaagcctacatctgctaaaacttttaaatttaaagttaagttaaaagattgtcctaaatccccgttttcagaaattcttggagccttattttttgaagatttgaacttagtatttccacgtccgccttttcctccttttgctactaaataagggatttcttctataacatcgcaaattaattttttatcattataaactaaagtacctaaaggaacttttacaaaaatatcttgacctttagcgccatatctatttttgcttcttccgttttcaccgtcatttcctttaattatgtgttcattatgaagcgttaaaagtgtatttaagcctgaatcacctacaaaatagatagaacctccatctccaccgtctccaccgtcggggccacctctatcaacatgtgcttctcttctaaaggaaataacaccatctccgccttttccagcggttattttaattttaacttgatctataaatttcattttatctctttttgtattcttctaattctataaataattcttttattcttcttgctaacggagcatcttcatatattttaaattcttgtgcattgactcataaaatcgcaaaatagtttaccaaaattttgtgttgtattaaatattcataaacataatcatcatattcttctaaaaatgcgtcttctaattcaggacttaacctagcagattcaataaagtaggctaggtcgtagtgtctatcaccttttgaagcaaattctcagtctacaaagtagattttgccttcagaatcaaggatatttttcggtcataaatcattatgtaatggcgttgtttttttcatctgagcaagaattttcattatgtgcctaaaatattgatttactactggtaaacacatctttttttgattgatttcttttatcaagcttttaattcttgctgcatgatttgaattaggaaaatttactttagaagtatgtaattgctttaaatttgaagcaattttaattacattgtctttagttaaatctaatggttggctgtttattcagcttcaaataatatctgtttcggtttctgatattaatttaggtacaaagtcaaatttctctaaaactttatagtctaatttatgattaaaacctgtaaattttttcttttgaacaaatctgcttccatctctaaaagatgtatttgtaaaaccatttttaattgatttcatagttataattttattgaattttaattaaactaaaaataaatatctgacaattttaacttattattagtaaaattacttcattttttcctaaatttttttatttttttcaatcttggcaaaaaaattgcaaatataagtgaaaggacaatatgaaagacaacaaaggattaaaacaagcttttttagagattgaaaaaaaatttggaaaagaagccattatgcttttgggagaaaaaccagatacagacacagaagtattttcaacaggatcattagcaattgataatgctttgggcattggtggatttcctaaaggtagaattattgaaatttttggacctgaatcttctggtaaaactaccattactcttcatgctattgcagaagtacaaaaaaatggaggagttgctgcttttatcgatgctgagcattcaattgatccacagtatgcaagaaatttaggaatcgatattgataatcttattttatctcaacctgattctggtgaacaagctttagaaattgtagatactttagtcaaaacaggagcaatcgatttgattgttgtagattcagttgctgcacttgtgcctctagctgaattaaatggagaaatgaaggatcaagtagttggtgcgcaagctagattaatgtcaaaagcacttagaaaaatcactggttctcttaataagaacggaacaactattattttcataaatcaaattagagaaaaagttggagtgctttttggtaatcctgaaacaactcctggtggaagagcgcttaagttttattcatcaatcagactagacgtaaggaaaaatcagcaaatttctacaggatcagacattattggaaacatggtcaaaattaaagttgttaagaacaaattagcaattccttttaaaacagcaaatgtagaaattgtttttgcacaaggaatttctaaatttgcagaaattgctcaacttgcagaagaatatggaattgtaagcaaaaaaggggcttgatactcttataatgatcaaaatattgctcaagggaaaactaactttagattacttcttgaaaacaataattcattatacgaagaactaagaacacttgttaaagaaaaattgaaaaattctgaataaaatcgataaaaacaaagaaaaataaagcattaaatttaaaatttagtaaaatttagtaaatgaaaaaagtaaagaaatttgatttttgaattttactatactatgtttttttagtgttaattttagctatactaagttctttaatttacttatcttatttatcatttaagaaaaatttaaacttagaagctggaattatcattttttttatttactttacaaatttgatttcaaattcttatttagcttttcaaaatagacactttgaagcgaaattaccttgaattattgtttgttcttttcttccttatataggtcaaattttatacgttatatttgggagaagatatttttatagaacaacttcaaaacaatatctaagagaatataaaaattttacaaaactgaacaaagaccaaaataatttttacttagaaaatctgccttctcaacaaaaacaaatgttggaattttcaagagatatttttaacactccgatttataaatttcaagctgaatttatttcagatggacataacttttttaaacaagtttattcagatattaaaaatgctaaaaaatttatttttattgacacatatataataaaaaatgattttatttgaaagcaactcaaaattttacttcttgaaaaagcaaaagaaggtgtgaaaattaagatgattttagacgcttttggaattttaaaaattagttctaaggactgaatagaattaagaaaaaacaaaattcaaattgtgttttataacaaggtttttcttcctttttttagtgcaaattctttttatagaaatcataaaaaaatttacttaattgatggagaaaaagtatatattggaggaaataatatttccgaagaatatgctggcttttctgaacaatttggctattgaatggatgtaaatttaaaaattcatggagagatggttgaaaatttttgctataactttttatttaattgaaataattgaagctatagcaaaaagaagaaaattgatttatcaatatgtaaaataaatcctaaaaaaagtgaagaaaatgaagacaaaagcttcaaaaatgaagaaaatataggaacaatagtagaaagtggaccaattacaaatgagtctttaattgaaggattgattttaaaacaaatttacttagcgaagaaaaaaattcaaattttctctccttatttctctccaacttataaaattatatctgcattaaaacaagttattttggcaggtataaaagtagaaatttatataccgggaagaaatgacaagaattttataggaattataaataatttttttgctaaagagcttcagaatgaaggcgcaaaaatattcttctttaaaaatatttttttccatggtaagtccttgattatcgacgaaaaaataggaattattggtacattgaattttgatactagatctttatattcacagtatgaagttaatgtgttttttacaggtcaaactattgataaatttttaaattacatagaaaaaaataaaaccctagaaattattcaaagaaaaaatataaacaaaaaattttcttggtttatcaaaatgcttattttatttttcaaaccattaatttaaaaccaaaaccaaatattaagttttggtttttttaattttattaaactagtataaaatttcactgaattaagaaaggaaaaatgaacaaatttaaatatttaaccctaggaatattatccactgtagtatctacttctgttttagtttcttgtggacaaacaaataaaataaatgataatcaaacaaaaaccgttaatgattataactcaccagaatcagtagtttataatcaaagatggcttgcaaatgtttgaaattctgtaagtgctgaaaaagacgcaatgactttaaatttatacaattcagccaaaaaacaatttgatgctatgatcaagcaagaagtatttgatactaataaaattacagttgaaaatgacaaaataaaaattaataatcctgaagctggtaaagcaattccagtggtttttatggatatcgatgaaactattttaaacaattttgcatttcaaaattatttggttctaaacaacaaaatgtttaatcctcaaatatgaaatcaatttgtacaagatgcgcaagcaaaagaaattaaaggggcatttgattttataagatatgtttgatcaaaaggtggagttgtaatgtttaattccaatagagaacaagaaaatcagaaaacacctactttaaacaacttagtaaatgaaggtctggataaaaaatacttacctgattttgtttgatgaatgcaaggcgttgatttaacaaaaactgatccatgaaaccacataaaaaaagaaaataacaagcgtgtaaaatctgaaaaagaagaaagaatgaactttataaacgaacacacacaaggatttgatctatcttcttatagtcaatcaggaaatgcagttgtttttaaaaccgtgatgagaattggtgataactataatgattttaatgatatagccattggcacaaaattaaataaagatagaaataagttattacaagataacggaaaattatttggaaatttcgatataaaagttaaaggaattaaatacaaaaaacaagcagataaaactgtagtaaaagtagatgaaacttgatctgaatcatacgttttaattggaggaaatgcttcttatggtggttttgaatctgctttagataacaattactactcacttgataaaccaaaacaaacaaaagcattaaaagaagcactacaaacactatcttgaaatccaaaagtaaacgagtcataactatgaattttgcttcatttttaaagcaagaaaaagaaaaagactactttaaaaatattataaaacaactaaattttgagtatgaaaattatcagatttttcctaaaaaggaagaactttttaaatctattcaattatgtgattttgacaatttaaaagtagtaattataggacaagatccttatcatggaacagatcaagctgatggtcttgctttttcaacaaaaaacaaaattttacctccttcattaaagaacatttttaaagaaatttcaagagattatccttctttttcaaagcaaaatggaaatttggaaaattgagctaaacaaggagttttgcttcaaaatgttgtcttaagtgttagacaatcacaacctactagtcattactttttaaactgggaacaatttagtttaaatcttttaaattttatttgtaataacaaagaaaaaatagttttcttactattaggaaaaaaagctcaagaaattgcaactaagcttgatttaagtaaacaaaaagtatttaggctttcacatccttctccttttagtaataaaataagtttcgaaaattctcatatttttaaacaaataaaccagtatttaatttcaattaataaacaaattattgactgaacattataaaattttgctataataaactctacatttttaaaggaaaaaactatgcaacaaagaagaaaaagaagaaaaagaagacaaaaaagtaagtttgctttgagaaggaagaaatgactagtaattttattatgtatagcatttttagcatccatttgtgctggtgtaagttattattttctaaataacaaagcaggaaaacaactttttgcttcagtgaaaaaagatgaaccagtggataatggaacaagtcaaaatttaaattcaataaaagttgggttttgaaacattttaaattatgatgataatccaactaaagttggtaaaaaatttcaacaagaaaatctagcaaaagtaataaaacatttaaatcctgatgttattggtttagtcgaagtaaattctggtgatcctaaaaaaccaaattcagttgcaaacttaactaaaaaattaaatgaattagaaaatgctcaaacttatacttcaataacttcagatcctgtttttggagaaggaaatgaaggttcaactgaaaggtatcttttatttataaaaaatcagtaatagaaattttagaaataaataaagacaaactttatggttctaatccttatttaatcacttatgataatcctgtttttaattctgtgccagcttattttccagatggtaaagtaaattcagaaggtaaattaacttatcctaaaacaaaaactacaaaaaatgtggactttgcaagacctccagttggtggaaaatttaaaattaagaaaaataatcaagaattcgttcttgtagcttctcattttgatgctcctggtataaataaaggtggatatataaaaggaaaagaagaaggaaaagttgactcaaaagatggcttcgattctactaatggttctcaagagatttctgaagcaaatcatcttttagatactatggagttttttaaaagcaaaacaaacacagacaatcttttctttatgggagatacaaatattaaagctaaatcgcatgacaaagcttttgaaagacttttaacttcatataaatccttaattgataaaagcaataatactgctttgggtaaaaattacggaatttactcaaactcatatgacaagatttttcaatctaaatcttcaagtcttatgactgaaaacgctaataaataccctttatgagatgtaataaaagataatataactactaaacagagtttagaagatacatataaagaaaaacaaaaagaagataaaaaaccaattgacaaaactgatttacaaaacatagaaaacaaagtaaaagaatatatttcagatcactctcctgtgtatttcgaaattgcattaaattaaaaatttgttttattacctgtttcttcatttttaaaactaaaatgctttaaaaatgaagaaatttttattttaagtaaattatttaatcaataaaaatttaataaattttgttataatttttaattatttttataactaagaaggagataaaaatgtcaagtaaattagataaaatttatgataaattaaaagtttataccgaaattgaaggtatgtcaagatatgaagacgatgttgttgaacaacttaaaaacaacacaaaacatttaaacgttgaatacgaaagagatggtttaggttctttaattattaagcaaaaaggtgaaactaaaggtccaaaaatcattttagctgcacatatggacgaagttggttttcaagtactagatgttcaaaaatcaggacaaataaaaataaaaccagttggtggtgtttgaggaaatgcatttattggagctaaagttaaattaattacttctactgacaaaattttttatggagttgttggtcacacttcagttcacattatggaaagagaagcaatatctaaagctattttaaacaaagatttatttatggactttggttttgtttcagatgaagatgcaaaaaataatggagtagaaccaggagatagaatttacttaagtaatgaaacttttagatttgcaaatcctgaattagctgctggaaaagcaatcgacaacagagctggtgtagtaataattgatgaattagtaaatcgtttagcaaataaaaaattaccaaatactccttattttgtaggtactgttcaagaagaagttggatgcagaggagcaaagacaattgcttcaaaaataaaggcagatatagcttttgcaatagatacaggagcttcacatgatactgaaggtgcaatagcaggaattcctaaattaggagcaggtgtggctattgatattgctgatggaggaactatgatggatccgaaattagtaaattatttatttaaattagctaaagaaaaaaacattcctatttataaatatctttctcaaggtggaggaactgatgcagaagaattacaatattcaaatgcaggaactccaacaattagtatatcaattcctcaacgttatctacattcaacttatggagttattagcttaaaagatatttcatcaattattgatttaatggaagaatttatcttagcctttacacaagaagattttgaaaaaattagctacaaataatatataatttgaattggaaaaacactaagaatacttagtgttttttatttacttattaaaaagttttaaattaaaattatcattgacaaaaaggacattaacaaaattatgactaaaaaagataagaaggaaattagagttgttgaactatttgcaggagttggtggttttagattaggttttgaaagaacttctaaattatttaaaactgtttgagcaaatcaatgagaacctaacaagacaaaacaatgagcttttgactgttacacaaaacactttggaaatagcactaatcacgtaaacgatgatatagcaaatgtaattgatcaagttccagaacatgatttattagttggtggttttccttgtcaagattattcagtggctagaacaaaagctgaaggaattaaagggaaaaaaggtgttttatgatgaagcattttaaaaattattcaaaaaagacatcctaattttattcttttagaaaatgttgacagacttattaaatcacctgcaaaccaaagaggtagagattttggaataatgctaaaaagcttggaaaatgaaggatataatgttgaatgaagaattatcgacgcttcagattatggttttgttcaaagaagaaaaagagttttcatatttgcttataaaaaagaattaactcaaatcattaataaacaacaaattcaagaaaatatccttataaaagatggattttttgcatctgaatttttagtggaatctcaatttaaaaaatctaataaatcacggattcttaaaaattactctaatttagttgatgtttctaataatttttcttttaattttttcaattctggttcaatgattgatggaaatattttgactttagatttagttgctaaatcaactcaaaaaccttcatttttaaaggatattatcgaaaaagaagaagtagattcaaagttttttatttacgataactatcaaaaattttcctatttaaaaggggctaaaaaagtacaaagaacaaaaccaaatggagaacaatatacttactcagaaggatcaatgatttttcctgatgatttaaacaaacctgctagaacaatgttaactagtgaaggttctgtaaacagaagtactcatataattgaagtttatatgacaaaaaaactaagaacactaacaccgttagaaattgaaagaataaatggctttgatgataattgaactaacactggaatgccagaaagatttagatatttttgtatgggtaatgctttagttgttcctgttattgaaaaaattgctaaacaaattttaaaaatatgagacaaagcaaagtaatagttttacttcctaaaacaatggaataattaaaaataagagctgacaaaattttaagagttttattttagaaattgactcaaacaagcagttaaacaaaataaaagtaagtatgtcttttcccaaaatagattttaaaaaattaaagttttaaattaaaatagttaataacatatttgtattttataatgcatcaaaaaggagataaattatgaaaaaagcactaaaaccagagattagatttaaagatttcactgacgattgaatagagggtaaggttggagatttattttatcttaaaagaggaaaagtaattttacaaaactttattgaaaataatagaggtaaatttcctgtatattcttctcaaactgaaaacaatggagaacttgggaaaataaatacatatgatttcaatggtgaatttattacttgaacaactgatggtgctcatgctggaacaatattctatagaaatggaaaattttcaatcactgatcgttgtggaatagtagaaataaaaatttaaaactttttgattatttttgaacctcaaaatcattagcaatgatttcaaaacaatatgtaaataattctagtgcaaatgcaaaattaatgattcatcaactttctgatattaatttcaattttccttgtttaaaagaacaacaaaaataggtcaacttttttatacgttagataaaatcgtaagtctttacgagagaaaaattagtgtgttggaaaagcttgaaaaagctttcttgatgaatatatttgtgaagaaaaatgaagcaaaaccaagcattagatttaaagatttcaactataaatgatctgctaaagaacttgataaagttgtcaactcttttggaggtacatcattagaagaatattttaatactactggaaaatacaaagtaatcagtattggtagttttaatgaaaataataattataatgaccagaacttacgaattgatttaaatgaaaaaagtaaaaactttatattaaataaagatgatttagctatgatattgaatgataaaactcaaagttgcaacattttaggaagagttttgttaatccctgaagataataaatttatttataatcaaagaacacagagaatagttcttaataaattatttctcaatccattatttacttatttttacttaaattcaaaaggaagagaaggaataattaaaaacgcacaaggaaacactcaagtttatatcaattgatcagctgtttcaaacttaaaaataatttttcctacattagaagaacaaaagaaaatttccgagcttttaaagaacttcagtttaactcacgcacaactaaagcgtaagttaaatttaataaaaacatacaaaaatcgctcttaaataagatgtttgtgtaaaaatatgatttttcttcaaaaagtactaaatttcaaagaaaaaggccattttttaggcttttgcttacgctttagttgtgcgtgagtaatatctatatgagttaaaaattagaaatttgttcttgttcttctttgttatcaggaattatacagttaatatttttaatcatctgcacagtgaattgaggtatactgcctatagtcattatggttcttaaattagaatttttcaacacataataataaaattttacatctgaaagttggttgtctttagcttgtaatagtcctgcattagaaacactgaatttttcgtttctataaaatatactccctgctaaagctcctcttgtagttcaggttataaattctccatcatatttataataatttatagaacccattttcccgttattcgaagtttgtgatgaatatactggatattgccctggattgttttttatttcttgtttggaaacaaatcctccaccatctataataaaattatcttctatgttttttgagttcataaagtgtcaaatttattaaatctgacattcggttttccttcattttcctttacaaacatattctgcaagaaatattttcaagcttctcaaacaaatttatctttctctcataaagacttacgattttatctaacgtataaaaaagttgacctattttttgttgttcttttaaacaaggaaaattgaaattaatatcagaaagttgatgaatcattaattttgcatttgcactagaattatttacatattgttttgaaatcattgctaatgattttgaggttcaaaaataatcaaaaagttttaaattttttatttctactattccacaacgatcagtgattgaaaattttccatttctatagaatattgttccagcatgagcaccatcagttgttcaagtaataaattcaccattgaaatcatatgtatttattttcccaagttctccattgttttcagtttgagaagaatatacaggaaatttacctctattattttcaataaagttttgtaaaattacttttcctcttttaagataaaataaatctccaaccttaccctctattcaagtgtaaaatccttgatttttctttataaaaaaactacaagtttttttacttgtagtttttaaatttaaaaaattatttaatttttaatcatttaggatattggatttcttctatttgtttgcttgaaaaagattcttgtgcttttctaagagctattatgttaactaaagcttcatcgagttgtgatttatcataatcttgcttaattatcttgttgataaactcatttaattcgtcgatatatgactgagaaaatctggaattaaaatttcgatgataattatgaattgcaccttgagaatttaaactaataacattgtttttttgatcaattaagcctatatttaaatgtccttgtgtaccaattaattcagcttgtgcttgatatccttgaggtccaattctacttgcagtcataataccaattgaaccgttgtgaaattcaaacattcctgctactacatcaccatcatttcaagacttaaattcttcatatttatacgcatctcctaaagatcacactcttttaggatatgaatctaagtatcatatcattaaatctaaatcgtgcgctccgacatcaataaattgaccgccagatgttggaccaaagctgaacatattttttatatcttgttcaggatcttgggatagagttctgacataaaatacttttccaatttgaccgttatctactaattgttttgcatagctataatctcgatcataacgacgcataaaacctatctgaactacttgatttttataggtttttgcttcttgtacaagactgtaaacactatctaaatcaatacctaatggtttctcacaaaaaacgtgtttttttgcttttaaagcttgtaagatgttgtttggatgatgtgctgttggactaactattacaactgcatcaatttcttcattttcaagcattttttcatatgaattatatcaatatttaatgtttcaaagttttgcataatgctctgctttgtcatcaagcgaacaaagagcgattagctgggcattattgattttatttagtagattttcagcatgagtcaaacccatacgacctaaacctaatatacctacttttatttttgtattcataacttaatttacttgttttttcttcatttatgaaactttttgaagaattccgttttgatctgcttgaagtttttcacctttaccatctggaccttttcagaaaagttttgtagctactttaaagtaatatcctttttctactgtatcagttggttttttgtctctatctaaaccagtatgtttgttgtaaaagtcttcatatttgcttgtttctcaagaattatcaaggatttttgcagcgatttctaaagaaagttttcctagtaaatctgtatcttgctcaactgtagctgataatttattatttttaactgctatttgtgcatcttctgtataatcaactccagttacatatactttaccagatccaggtgtatatgaatcaccacctcctaaaggaattttagcagcttctaaagcagctatagcacctaaagcagattcatcatttgttccaaatactaattcaggtcttttactttgttcagtaaagaatgcaccaatatcgtttgaaacagctgtatttgctttgtctctgttgtcatctgcttgtctacctacatatgtttttccgtttgcagtttcttgtccatattttgcatatgaataaagattatattttactgcttggttatttttgccttttactgtttggataaatccttgtgctctggattcaccagattctgttcctggaattccataaactgagtatgttaatgcatcttgtggaagacctattttttgagccataaattgagctaaaataactccggcttgcttgttatctgaagcaatatttgcttctactttaatgttttcttgtatagcttttgctgaatttaataagtgatcagttgcaataactttgattccagcagcatttaattttttaacagcagaaattcctgaatcttcattaacatcattaaaaattactactttttgttgttttgcaataatgtttgaaatgtttgttgcttctttatcagtatcattttgtgaatcatatacttcatatgccacacctagttctttagctgcagcttcgattcccttttctacgttttggaaaaatggattgtttctggtagaaaaaactacagctattggcgctacttgagctcctgtattagattttgaagcaataccaaatgcagtaccaaaataaatagcaattgccgctactactccaagtactcaatataatgttctaataaataactttgacataaaaattcttctttttcctttctaaatccttactaatactttgtagtaaagttttgataatctttcatttatgtggtatttttgatcaaataagatagctaatactatgatgatacctttagctactaattggaagttagagtcaatttggaagaaactaaatgtatttaataataaagccattgcaaatcatcctacaatagtttttccaactccaccttttcctcctgttaatgctgttccacctaaaacaacagcagttactgtatctaactcaaaaccataacctgtttgtggagatactgaagtagttcctgaggaaatagataaagcacctaaaatagcgaatattccggaaaacatgtacactgaaatcaagattttattgtttttaattcctgaaaatgtagcagctgttggattatctcctactgcataaacatatcttccaaattttgagaatttaataaagaatattaacaatgcaactgctattataaacactaaaactagtacagtaaagttagatcctaaatcataattaaagaagttaaaaataggatcatctggatttgttattggggttccttttaacaaaatagcaatcgctcctctaagtgataacaatccagctaaagtaacaataaatggaggtattttaaacttagaaattagtattccatttaaaactcctaaagcagctaaaataattattaaaatgaataaaactgctacaaaatgaagccccaacttaaccgttagtagtaaataaattgtggctccaaatccaattaatgaaccgactgaaagatcaattcccccagttagaattactagtgtttgaccaagtgcaataaatcctataaaaatgttgttttttaaaatagcaacaaatcagttataggaactaaagaagttaacatttaaagcaccagtaataaaagcgataattaagaacaaaataagtaattttgtgttatttaaagactttttagttctttctactgtgttaataaatctatcttcttctttgaattttaagaagtttcaaactctttcaacacttctcattttagggtgtactttttgagcttctttttgaagtgtttttacttcatttttataggtggattctatatttttcttttgtgataaataagtattttgacctatttttcttgtttgaaactcgttttctaaagaatttaatttctcttttgtttcttggtttaaaattttaagagtttcagctaatttttcctgtctcgtagtgaaaaaagaaggatcttgtgaaacaatttgttcaaattgtttactaattttattaatttgatttttagaatcttgatgcacatattccataaagtttttatgaagagcttcttttttgcttatctctttttcatatttaactttttgtttttctaaaaacgtatcagctttttcttttttagtttgtgcttcttgtttaattttttcaacttctaaatcaatttgcttttgaagttctacttttttattatcaaaagattgttgatcaatttctaaatttaaaaattgtttttctagatcttctaaaggcttgtgagcttgtataattcttttttgagctcttttttcaatgaagtcttttctatcttctgtcgatattttaaagttaaaaaagtcgtcatgtcaagtattaattgaagtatctaatttttcttgattaaattcgattctttttttgtaatagcttcgaatttcttcaatttttgcttctcttgagaaaaaatctaaagaatctacaaattcaaatttttcttcttttttaaacttgtttaaaatttttagcatctaatttcctttctgtaaatttagtgaatatttcataatattttgatcagtgatttgatctcctactaattcacctgtaattcttccttcgtacatagtaattactctatccgcgattccaattacttcttgcatatcagaagaaataatcattattgttttattttcttgttttagttggtgaattagattataaatttcttttctggctccaacatcaacaccacgagttggttcatctaaaatgaaaaattgtggctctgttgctagtcctttagcaatagaaactttttgttgatttcctccagataaagaagttgctggattttcttgtgaagaagtttttatttttagttgtttgatataagaatttgttgtttgtgatattttagtctttgaaatcaaaggtaaatatctagaaaactcattagaatttaaagaagaaattgtgatattaaaattaataggcaagttgacatttaaaccaatttgttttctgtcttctgacaagtagtaaattccatgatttagactatcttttatgtttttaggtttaaattctttaccatttagttcaatatgtccattcaaatatggcatatcaccaattaatgttctagcaagttcagtacgtcctgagctaactaaaccatagaaaatcaaaatttctcctggttttatatcaaaactaatatttgctactttttcatttgaaagatttttgaccaaaaatgaaggatttttacttaaaacaggagttttttcagggtatctgtgttcaatgtcaaaaccaaccattaatgagataatttcatcttcatttttaaattcaacagttggtttgctatcgatgtacattccgtttctaattactgtaataaactcgcaagtttgttcaatttcttccattctgtgagtgattcaaactattgcaattccttgttttttaagctttttaactaaatcataaagtttttgtgtgtctttttcagttaaaaccgaagtaggttcatcaaagataataatttttggattttgtgataaagcttttgcaatttcgataaattgtctttgtgaaactgacagagaagagacaatggcttttggactaaaatcaacacctaagatatttaatagttttttagcttcttcatcttgttttttatagtcaagtaaacctaatgagcttctaaattcacgacctaaaaaaatgttttgagcaacagttaaattttctactaaatgttgttcttggtgaataatagcaattccttgtttttgtgaatcgataacaccagaaaattctacttttttatcacaaatattattttcacaaaagctcatttttccagaatctggttgataaactccacttaaaaccttcattaatgtagattttcctgcaccattttcaccaattaaggctactccagcacctttgtaaagttctaaattcatattttttaaaactttaactggaccaaaacttaaatttatgttttctagcttgaaaaataaaggatatttttctaaaatgttcaatattacctccttatcatgagatgattgtttttaaataattcatagctttttttgcatattcaagagggtttgctttttttggatcttgttctgcttcaacaattaatcaaccttcataatttgaattagctaagatttcgaaaaataaattgaaataaggagcatctccatcgcctggaactgtaaaaattccttctttaacaccttctaaaaagcttcaatttttaagttgtagttcaataactttttgtgatcttatgtcttttaaatgaatatgttttacacgatgaattgctttttcaagtgtacggtcaatgtcttcacctgtgtgggcaaaatgacctgtatcaaaaactaacgaaacatattcaggttctgttaaatttaagatcttttctgtttcttttcaggtttgaatacctgttcccatatgatggtgataaactaaatcgataccttgttctttagatcattttccatacatattaagaccagcagctaattgaacaaattcttcttctgtaaaaaatggtttgtttttataaagtggttttgcttgaccttggattgagtgagtttgttcacttacaacaacaacttttgcacctaattgctttaaaaataaacaatgtttttgaaattctttgaaattattttcaatatctgacaaaatatatgcactaaatcaagctgaagcaatttctaagttgtgctcttttaatttttttaataatacctgtggatcttttggaaatttattaccaatttcagttccttgatagcccgcttgtgccatttcagaaattgcttgttcaaaagaaatatctccacctaattccggcatatcgtcattagttcataaaataggcgcaacaccaactttaacattctttaatttatatattttattcattagttaaaattattattttcctttattttttcttcattttccttcgcaagagtttcaacttctttgtttgttgaaacaagtgaaagccctgtttgtcaaaaagattcaaaacctggagtcattgatttaggataaacttttatttcaattaacattggtttttttgttgtttttgattcttttaaagcttggataaattcatcttctgttttagctaaaattgcttcgaatccatatccttttgctattgttgcaaattcagtaattgcaagttgtgagtactcattggtatttggtttagttctacagtaaaactcagtttcaaatgattttatattagaaccaacttgtaaattattgatgcaaccaaaacctgaattgtcaaataaaataattacaacagggatttgttcttgaatagcagttagcatctcactatgaagcattaaaaacgaaccatctccaactaaagcatatgaaggaacataatttaaagcaattgaagacccgatagcagcttgaatttcgtgtcccatacaagaataaccgtattcaacgttataagagccaaattcatcagtttctcatagtctttgtaaatctcctggaagagaaccagctgcggcagttattgaagctttttcatctatgtattttctaattaaatgtaaagctctagtttgtgaaaaaatttgaatatcttcttgataatgttcttttatagctgctgcaaatttatctacagaactttgatttttatctactactaatgctttattttttaaaggtttttcaagctcataaattgttcttaaataatcatgtcattgtgttttagcttgtaaaagttcttcatttttctttatattttgtatataactgaagtcttttatatcttctaataaagtatttaaatccttaagtgctgcttttaaatctgctactatagaaagagctctcatttttttagaatcaaaaggttttatattaatatttacaaattttacagattcattaaattgagtttttgaaccagttgtaaaatcagtatattttgttcctaatcctattactaaatcagcattttttgcataagtattagccactagagaacctgtaaccccaattccacctaaattttgctttgtagaagaaggaattgaactttttcctgcttgtgtaaagctaaaaggtattttggttttgcttaaaaattttaatagcgcagaactagcttgtgaataacgaactcctccacctactataactaaaggttgtttagcgtttttaattaatgaaactactttttgtaggtctttagcatctggtcttgttcgtttaaattcatagattcttttttcaaaaaatcaaagtggaaaatcataaacttcagcttgaacatcttgtggtaggcaaattacaacagctccagtatttgcaggatcagttaaaacgtcgaaagcatgaattaaagaattaataatttgctcaggtctgttgattctgtctcaatattttgctaccgctttaaaagcatcatttgttgaaatattaaaatcataagtttgttctatttgttgtaaaacaggatctggtcttcttgaagcaaaagtatctcctggaaaaagtaataaaggaatattatttgcagttgcagttcctgctgcggttagcatattcgctgctccaggtcctactgatgatgtacaagcgataatttgttgtctgtgtttttgtttagcaaaaccaagagctatatgagccattccttgttcgtttttaccttgaattagctttaaattgtgttcttcatttgcaagcgcttctccaagtcctaaaacatttccgtgaccaaaaattgtagctactccatagacaaattttgttgtttgattatcaactttaaaataaacgttatcgataaattttacaattgcttgagctgtagttaatctaattgtttttgccattattttaaaaactcgcttatttttactactcttttttcttttaatgatttagttgctgctttagctaataaaactgcattatatccatcttgaatgcttacttttacttctttttttgaagcaattgcttcaaaaaagtctttattttctttgatgtaagcattatgatatctttctaaaaagaaataaagtggtttttctttagcaacaccttgatctgaagaaataattaaagttgaatttgtatcattttcaatttttatattagcttttgttccatgaatttcaactctttggtcatagccataacttgtttgtctgcaattttctatagttgccatagaaccatcttcgaaatttaaaacaacaaccgctgtgtcaatatcgtctaaatttttaatttctggatcgatcaatgctgaacctgtagcgtaaatagattctacttttttgttagttaaaaataaaaccatatccaaatcatgaatcatcatatctagaaaaataccacctgattttttaatgtattcataaggaggtaaacctggatctcttgaagtgactctgagttgaactattttgcctacagtttcgtttaaaattgcttcttttaaggctaaaaaattgtgatcaaatcttctgttatgaccaactgtaaaatgtttttttgtctttttaactactttttctacttctaaaattttatctaaatcaaaagctactggtttttcacaaaaaacatgttttcctgcttctagagcttcaatcgaataagtatggtgtgtatcagttgggctacagatataaataacatcaatgtctggattttgaagcatttctttgtagtcagtgtagaaagtttttatacctaatttttcaaacttttctttattttccttgcttaaataagcatctgcaatagctactacttgtgcattgtcaacaaacttattaatagcatttgaatgtacataacctattcttccaccaccaattattcctactttaaaattcatttttttcctttcaatatttaggattttttttatttaatcacaagtgctcttctgcttcgattctgtcaactcaaggattgttttttaaatgtttaataattcaacaataataaagtggataacctggagctgcagaaacaggatgaactaatcctccttcaactgcatttacatcatcattttttacaatataagcttcatctccagctactgataaaccaaaggcagaatctttttcaaattggaaaaagtacatttcaggctgtggatggtgatgtggtaaatatgaagatcattttccttgatatgttattacttcaccaactactaaattagattttggattagtatgataatcaaaaaatgttcttacttttcttttagctacttgttctcatttatctgcgccaaaaaattcttctcttgagttagatttatcgtaaacatagtttttatccagggttttattatcagttgttataaacaagaatttactatcttttttagttttaattgctacactttgttcttgttttaaaaggattaatttagttctttgttcaaaaatattgcttctttttaaagtaatttttttaccatttagttctaaactagcattacctgttaaaagtaaaattgcagtttcttcatttttagctacttgataagttaattcttcattttctttagcttttcacaaatcaagatctatttccataaaactagctttttgcttgttttttctatcaactaatctatgaaaaccataatctaagtgtctattttttaaatgcatctcattgctccttagttactaaattaggatcagattcgagtgctttgtctttaaaatcaaggatttttttatgttcaggaagatcaaaagaagaatgagactgaaccataattgaagcagctgaagtagcaagtgaaagtgcttctttcaaacttacatcttttttaaaataatggtttaaaaataaagaagcataagcgtcaccgccaccgtatccttttagcattttgactggtacaatttttgccactaattttgtatctctagtatagagtttggaaccttgttttccgtttttaattatgatgagttcaacaaattttagtcagtatctagcatagtcatcatcatctaaatttgcttcatttttaaagcaaaattttgatgttaactcaatttcttcacgtgatccaatgattaaatctgcattttgagcaactatttgatagtatagactaacttcatctaaattagctcaagaataagctctataatctacatcaaatactacttttattccattttttttagctaaaaataaagcttttaaaaccgcttctcttgaaggtgatttagaaagagctgttcctgaaataattaaagtttttgcttttaaaagatagtctaaatctatatcttcaacactaagttgtaaatcagcaacattatctctgtacattaaaatagtacttttttcttcggaaagcatttctgtaaaagtaagacctaatttatgtgttgcgtctttttttatatgtgaagtatcaattccttcttttttaaagacatttagaacaaaattaccaaattgatcgttgcttactgatcctaaaaatcctactttattgttcattctagctaagccaatagcagaatttgcagttgatcctccgatgtattttttaaaagaataagaatcttcaagtttgttgtaataatcggtaggattaaaatcgatagtgattctacctattaaaataaagtcaaattctttattcattatgacattcaatccactttatcttctggatttcatttagtagttattttaattaagttagttcagaaattaatacttgattttccagtaatatctccatatccgaatttagaaaatcttgttcctccaaagctaaatggctctcttggaacaggaactccgatgtttactcctagcattccaggttttacttttgcaataatttcttcagctgctctacctgattgagtaaatactgaagctgcgtttccatatggagatttttgttgaatttcaatagcttctgaaagatttttagttctaattagttctaaaactggaccgaacacttcttgtgaacccattttttctggattttctgatcaatcaataattgttggtccaaatcagaatccatgagttttgtcttcaggaataacaaagtcttttgtcccatctactaaaatttttgctccttgatctttagctcattgtagataatttactaatttttcaacagatgctttagaaactaaaggtggaaagttaaatccaagtctaaatccaagtgcttttttagtaagtgtttgaataaattcttcgttttgtccaactactaaagctactgaagcagccatacatctttgaccagccataccaattgccgctgctaaaacttctgtagctgctgtttcaatgggagcatcttttagaacaaaaatatggttttttgctccaccaagggcaagtactctttttgagtgaaatgaagcatgtttgtgtactattttagccacttcagtagatcctacaaatgtaattccatcaatatctggatgtgaaaccatagcatttgcaatttctgcttgaccatttactaagttaaaaattccgcttggtaatcctgcttcttttcacaagtcagccataaaacttgttgataaagggcatagttctgaaccttttaaaattacagcatttccaagtgcaattgcattaggaattgatcagttaggaaccattaaaggaaagttaaatggagttataattccgaaaacaccaacaggtcttttttcttctctggctacaattccacgacttaccatttgtgtttcgccactaattagttgaggaatagaacaagcaaattctgtaagttcaattactttttcaacttcagcaattgcttcttttatagtttttccattgtctaaatgaattaaattagctaattcttctttatgctgaattactaattctctatatttataaataacttctgatctttttttaaaagttaatgaagctcatttttcttgtgcgatttttgcttgagctacaattttatttaatgtataagtagaagttacttctaattttgctaataattttccattatgaggagaaaatacgtctaaaatttttggattttcttctaaatgaaattcattgttataaaaagattgtatgtaatctcttttaaaattcatttttctcctttttattaataaattcgtgcttgtttatttgaagcactaatattattttaaacaagaaaaacgattacaattaaaacaaaaaaattcttcaaaaattttataaactttaaagaaaattgattaaatcttgataaaatttttaagttatttttcttcaaaaaagaagaaaaaagttaatttacttaaattttgattttaatttcttattaataatttttcaaaaaatcctaagttttgttttgtaaatgaaaaaataattttaatttttattcagcatcaaaaaaatgattttcttcccaaaaatttattttttgtcccttatttttgtataataatgaaataaaggagattatttatgaaaaagggaaatattattaatttaattaaatattattcagaaaaaaatgacattgcttttagaaaagagacttatattattgctaatgaatttgacaaaattggtgatcatgatttagcagattacattatgacttcgatgtcagaagcaaatgtttttattcctatggaaattgaagaaagttttgaatttttgaaaagagtaaaaattcaacctgagacatttttattgccatctgaaattcaaaaagatatttttggaattgtaaattctacaaaacacaaaattggtgtaaataaatttttattctatggttctcctggaacaggaaaaacagaatctgcaaaaacgttagcgaaattattggatagggatttatttatagttgatttttctcacatcattgataatacactaaatcaaactattaaaaatattgcttcactgtttgaagaaattaataggtttccatatcccgaaaaattagtagttttattgtatgaattagatgaagtttcttttaaaagaaacgattctaaaaagctgagtgaaatgagaaaagttatatcaatgatattaaaacgtttagatgaattaaatgaaaaaattgttttaattgcaactaccaatttatataaatatcttgataaaacgttattaaaaagctttaatttttcaataaattttgatagatatacaaaggctgatttaataaaagtcgctgaaagcattttagaaacttacctagtaaaatgtgataatgtagctagaaacatgaagctttttagaaagttactaacaagtttagaaacaattcctaatccaggagatttaaaaaacataattaaaacttctttggcatttagcgatgttaacaataaatatgattattttcaaagactttattctgctttaaataataaaaatattgatttaatagctttgaaaaaagaaggattttcacttcgtgaaatagaaattttaacaaacatttcaaaaagtcaagtagctcgaaaattattgtcttataacgagcattcaataaaatcgaaataaatgttaaaaaattatttacttatatgaaagtttgaaaatttttaatatattttataaaacaaaagaaagaaaaatgtaatgaaaaaagaaaatgttattaatttaataaaatattttgcaaacaaaaatgaagcaggttttagaaatgaagcatatttaatctctcaagattttagcaataaaggagattatcaattggctgaacatattttgggaattttagctggcgataataacacttttgttcctcaaatatataattttgaatttggatttttaaaaaagataaaactaagcactgataatatccctttacctaaaagtataaaagatgatattacaggtattataagatctacaaaaaatagttctctagtgaataaatttttatttagtggacttccaggaacaggcaaaactgaatctgctaaatacatagcgcaagcattaaaaaaagacttatatcttgttgatttttctacaataattgatagtaaactcggacaaacaaccaaaaatatttctcaactttttgaagaaattaataacttttcttttttggacaaaatagtaattttatttgatgaaattgatgctttgggcttaaatagaactgattcacaagacttaagagaaatgggaagagctgtttctgcattgctaaaaggtttagatgagttaagtcaaaaagttttattaattgcaacaacaaacttacaaaattatctcgataaggctttgttaagacgttttgattacatagtaaactttgatagatatactaaaaaagaacttttaaaaattgcagaaaatattttagactattatttgactatgtttgaaaatactgcaaaaaataaagaattatttataaaaattttaaatgtatatgacaatattcccttgcctggtgatttaaaaaatattattaaaatatcctttgctttttgtaatataaacgatccttatgattacttaagacaactttatataaaactttttaaaaatattcctggtgtgccaaaattaaaggagcaaggctttagtaaattagaaattagtatactaaaaaacaaaaatctaaacaaaatagaacaagaaaatgatttggaggaaagtattgaataaaacaactaacaatgtcttgtgattaaaaaatggaaaatttttgcccaaagcaggtggtattcctggtaacccaaatattcctaaaaataaatttttagatatcgaacatttaaagaaacttttagaagattttaaagaactaaaaaaattttgaatagaagaaattcaaaaaaatactttaaaaataaagccaattgtatctatttactacaatgatgtaatcgcaaaatctaatagaatgaaatactttttagactctaatccactaaaaaacaatcaaacaattgttggaattcaatttaatgaatctgacaaaatactaaaacacattattagccattgtattgagcttgatgttctaaataaagctgttaaaaacttagagaatgtaataaaaatttcagaatctaagtttaataaaagaatttcttatcaagatattgaaaatatttctcaaaataagaaggaaaatgaagaactttttaaagattttcaaatttcacaaacgctttatattaggattttagttgatgcttattacatagaaaaagttggtgtaaaactaaagaacataagcgaaaatttaagtgataatatcattgttactctttatgatattggcattaatatttcagatattttaaaagattccaatataaaaaatcatctatttcctttgaacaactctgtgataacactaaatcttgaacaatacaaacttttagttgcaaaatttccttatttaattgctatggaaagtgaaaataatttaaaaagggatgaattaggctatagttctaaaaagcaagaacaaatcatcactattcctgaacctaataacgaacctgtagtaggcgtaattgatacacattttgtagaaaatcctgatgatgtttactttggaaagtgagttgaatatcataataaaatagacaaagccattcctataacttcaaaagacagagagcatggaacagcagtgagctacataatagttgatggacctagcgcaaataaagatttagaagatggatgtggtaaatttagagttagactgtttggtgtttcaaaaaatgatagttttaacacattttctattttaagaacaattgaagaagttgttttatctaacttagatattaaagtatgaaatttatctttgggttctaatttagaaataaatccatttagcatatctccaattgcatctttacttgatgaacttcaagcaaaatatgacattatttttgtagtagctggtaccaataaaaaagatgaaggtactgatgcagttaaaataggttcacctgcagattcaattaattctattgtagttaattcagtaaacagacaaaaacaatcttctgatttttcaagaaaaggaccttctctttccttctttgtcaagccagatattagttattatggagaaaatattacagtttgtacagctctaggagcgaaaatagtagatggtacttcatttgctgctccttgaataacaagaaaagtagcttttttaattcatatcttaggattaccaagggaattagctaaagctttaataattgattcagctattggttgacaaaaagaaaatgactctgatttacatctaaaaggtcatggcgtggtaccaatacatatccaagaaattataaaaagtaaaaaggatgaaattaaatttttaataaattctgaaactttgggttatcaaacttataatcataatatttatgttcctatttcaaataaaacttttccttttattgcaaaagctactttagcttatttttcaactacttcaagattgcagggtattgattatacaaatactgaattagattttaaatttggaaaattaaaaatgaattccaataaaaaaatcgaaattagttctattaataacaataagcaagattatgatggtacttttaacttgccagaacgtaaagttagagaattatttagaaaatgagataatgttaaaaatattattgagtatttaaaattagaaaataataaaattaaaaataaagcaaaaaaatatatcgataatgatgcttgaggaataagtgtaacgaaaaaagaaagattaaatcttgaagaaaaaaattcaataaaatttggaattgtagtgactttaaaagaaattaaaggacaaaatagatgaactgaatttattcaactttgtgactataaaaaatcctgaacagttgaagagttaaatgcagaaacatcatatgatttatacaatatgatgcaaaaagaagtggaatttgataattaattttatttcaataaagtatttaaatttaatgaaaaagcaaagatattttttttgctttttttatattcataaaaatattaaaatttgctaaaatctttataaattacttataaggagaaaaaatgaacaaaaaagaagaacttttaaaagatcatttaaaggagttagagttaatttctaaatcatctttaaatgaaaatcaaaaagaattaattaaattaaacttagaaattttaaaaaataatgacaaaatttccatagacgaatttgaacaaatttgaagatttttaaaacaaagagtagcaacaggttttgtttttgatgaagccccagaaataaataatcaaagcatcgcaatacttgaaaaagacgaaaaattatctttttcttcttcaaaagtgaaggataatttacaaaattctttaatcattggagaaaattatgatgttttaaagaatcttataggagtagagagagagagagagagaggattctaacttcgatttaatctacattgatcctccttataacactcaaaagacgtctgatgatggaaataatttaactgatgaacaaataactgctgataaatttatttatcgggataaattttcaagaaccggatgattaaatcttttaaacgaaagactaaaattggcaaaacaacttctaaaagaagatggtgtaatttttgtttcaattgatgataatgaacaggcttatttaaaagttttaatggatgaaatttttggtgaagaaaattttgttgcaaatttaatttgaatgaaaaaaacgggtcctagtggaaacacaagttctcaatattctatagatacaataactgaatacattttgtgttatgctaaaaataaaaacaaaaaaacttttaattatttaaaacatgatgaacaatctttttctgattcaggttttgatttaaaagacgagttttttgaagaaagaggttattacagattagttgatttacaccgtggggctagcgcatcttcttttaaatatttagaaagtcttgattatgaaatagaagctccggatggcactttttttaaattgtttactaatattaaaaaagccaaatctgcgcgttatacttgatcatataaaacatacttagaaggtaaaaaacaaggctttattcaagtaataaaaaataatgaaggttattgagtagcaaaaagaaaacaatatcaatttgtaaaatttaatccaaaaacttttcaagtagaaactcaagtagcgggtcgaagatttaataatgtaattgataaaaattacaatagattaactaatggtttttacacaacaaaatcagctaatgaaataactgaagttttatttaataaaacagcatttaattttgcaaaaccggttggtttgatgaaatatttaattaatttattttctgataaaaaagacattagaatccttgatttctttgcaggttcaggaacaacaggacaagcagttttagagctaaataaagaagatggtggaaatcgttcttttgttttagtaactaataacgaaaataatattggtcaaaatgttacatatgaaagactttatagaattaataaaggtgaaggaacaaattctcaaaaagactttgaatgaatcaagaaaaatgaagcatttgatacaagtttaaatgtgttttgatctaaaacttataacacttcattgttaaataacaatataacaaatcaagaattaaaagataagtttaaaaaacttttagaagattttggaatcaataaagacaaagaaaaaattgatgattcaatattaaaaacactttcatctttaagaccatataaagaagaaaaagaagaaaaataaagtaaaaacaacaattagacgaccatacctgaggattaataattactaaaaaagaaagataaaacaaggaatgcaaaataaacactcaagtgggattggaaatcacttttaaagaaataaatggaataaatagaataggcgaattcatacaaaattgtaaaagtcagaaatgaaatgcatatactcttgatattaatgcatctaataatatttttattaaaaaacaggaggatttagaattaatttaattataatttagcttaaaaaattacttataaggagaaaaaatgaacaaaaaagaagaacttttaaaagatcatttaaaggagttagaacaaatttctaaatcatctttaaatgaaaaccaaaaagaattaattaaattaaatttagaaattttaaaaaataatgacaaaatttctatagatgaatttgaacaaatttgaaggtttttaaaacaaagagtagcaacgggttttgtttttgatgaagccccagaaataaataatcaaagcatcgcaatacttgaaaaagacgaaaaattatctttttcttcttcaaaaatgaaggataatttacaaaattctttaatcattggagaaaattatgatgttttaaagaatcttataggagtagagagagagagagagaggattctaacttcgatttaatctacattgatcctccttataacacacaaaaaacatctgatgacggaaataatttaactgatgaacaaataactgctgataaatttatttatcgtgataaattttcaagaactggatgattaaatcttttaagcgaaagactaaaattagcaaaacaacttctaaaagaaaatggtgtaattttagtttcaattgatgataatgaacaagcttatttaaaagtgttaatggatgaaatttttggagaagaaaatttcttagttaatttaatatgaataaatgcttgaggtagtaaacaagatgcaaaatacttttcacaaaatcatgaatatattttagtttatgcaaaaaatattaaaaaactgaagattaaaaaaataaacattgcagaaaattcagatcaatgaaaatgaaatgacaaaattcaaaaatgagagaaaaaattagcaaatcttcaaaaaggaagtaatgaagaaacgatttttgatcgaaagaaaatggcatacattatttgatgaaatgaaaaattaaatttattcaaaacagataataatattgactttaatttaattactgaagatttaacaactgatacaataatttatgattattctacaagtgaaagacaattattaatttcacaaggctatactcctataattccaaaaatagttagaaaaaataaatatggtagatgaacagtttctgaacaaacttttttagaaaaagttaaaaataatgaggttaaagttcagaaaataaaagattcatatcaaatttttagatatgatgtccaagataaaataccaaattcaaaagaacaaaatcctagaagtgtaatttttaattctacactaaataaattgctagaaaacgaagacaataatgaacaaatacaaagggtttctacaagtgatggaagttcgatacttcgatcaatttttaattttgactctttctttgattttccaaaaccagttaatcttatcaagtacataattgacttatttccttctaaaaacacaagagttttagatttctttgcaggttcagggactactggacaagcagttttagaactaaataaagaagatggtggaaatcgttcttttgttttagtaactaataatgaaaataatattggtcaaaatgttacatatgaaagactttatagaattaataaaggtgagggaaccaaaggtcaaaaagacttcgaatgaatcaagaaaaatgaagcatttgatacaagtttaaatgtattttgatctaaaacttataatacttcattgttaaataacaatataacaaatcaagaattaaaagataagtttataaaacttttaaaagatttcggaatcaataaagataaagaaaaaattgatgattcagtactaaaaactctttcatctttaagaccatataaagaagaaaataaagaagaataaagaaaaaataaagtaaaaaggaaaatataatggaacttagtgaaaaacaagctcaagcagttgatttattagtatataaatgaaaaaaagcatttgataatcaacaaaaaacttctattacttttaaagcacctacagggtcaggtaaaacatttataattgcaaactttattgatagagtaatggaagaatttgataaaaactcaggtaaaaaactggtttttatttacaatacaatttctaatgctgaattacctaaacaaactttaaataaatttgaagattataaatttcatttaaattcaatgaaaaatgcaactataaaatataaagaatctccttcaaaacaaaaagaagctaaaggtgatcaagaatataatattttagctaaagaagctgatatttttatttttggtacctcttcatttggtaagtcaactatctttgtaaaagaaggaaaattagatgcttttattgatgaattaagatttgattactatgttgtttacattagagatgaagcacatattggtacatcaaaaataagtgaaaagccagatgcaaaatcatttgataaaaaaataaaagaactagataatgtttttgaattaatgatgactgctacacccaaagaaaatgatgatattgtggaaataacaaacaaagatttagatgaagataattgaaaacttctaaaagctaataaaaatatcaatttaaacatctcttacgaatctacagatgaaatagataattcatttctattagaacaagcttgtaaaacttttgttgatattaaaaaacaatacaaacaaattagtgaagatgaaaaattaaaaaatttatgaaaagtaaatcccgctatgcttattcaagtaaaagataaaatgcttgaaaaagaagctgaatttaataaagaaataaaacagattattaaaattttggaaaaatataatttaagttatgctaaatatttttcagaagaaaaaacaaaaactgttgccggtaatacttcaaaaactgatttaaattctttatctaaaaaagatagtgatgttgatgtaataatttttaaagttggacctgcaactggttgagatattcccagagcttgtatgttagttcagttaagaaatgtttcttcagaaacacttgataaacaaacacttggaagaattaagcgttttcctattcctataaaaattgaaaacgaagatcacagaaaagaattaagtaattcaatagctaatgagttttttgtttattcaaataataaaaaatttgatcaaaatttacgcgaaagaatctattacttaaaagagcaatacaaaaacaaaaaatttcttgttggagagattgataaagctagcataattaaaataaatcaaacttacaaagaagaagtttatgaattaatttccaaagaatttgaacaaatttgtgaaaaatttgaaaaatttagaaagaaaaatcaagactttttaaagattacaagaaaaagtaatatcaatgaaggtagatttatagaaaaaacaattttcgatcaaattgagcttgaaatttttaatgaatcattaatagaaaaatacaagaagctaataaccaaggatatgtgaaaggaaattgaatcaatttataatcagaaaattaatgaaaatattagagtttcaatccaatattataaacactacattttaactgatttactagaggatattaaacaactaaatgtagaaaattgggaaaacactaatcctactttaaatataaaacaaatcattgctccaccagaagaatatgtagaagattatgaaattattgacatcaatgactcaaaagattcttcaaaaaattatatagaaattaaaagtgaaatcgaaaaatatgcctattccaataataaaaaattgggaaaaaatgaagtaaaagtttctgtagattcagaaccagaaagaaaatttgttcgtttctttactaattgattagaagacgatgctgatgataatttggaaattaacatttgatttagaaactttgcaaataattcaaaaagtatattttgagattactttgaacaaacacaagtaaaaaaatcttatcctgatttcattgtttgtatcaatcaacaccaaattaatattgaaattaaaggcaaagggaacaaagacataagtcctgaaaaaaccaaagatttaattcagatgacacaaaaatatgtaaaaaaagctaatgagaattctttaaacaataaacaaaaaaataacttgaattttacttcattaatttgttgacctaaaaatgaaagtgatgataatttcttatgcaaaggtgcttcaacgttagaaaaaataaatcatttatttaaaccacaatcacttttagtcaccgaaagaaaagatgcacaagaatataagattgaagaaattggtcttaaaaagatttttagaaaattagcaaactaattgcttcttaaaaaaaaaaaactacaaaatgaggtggtacccttttcttctaaaattttttgagtgttttaattaattataatttgaaatgaatgcttccctaaatttaatgggagacattcattttattttgtctttaattcgtttgtgattgtaataataaatataatttgaaattgctttgtgaagttgtttaaaagttaaaaattctttttcgtgaccataaaacattctctttttaatgttacaaaaaacgattcaataacgctattatctaaacaatttccttttcgagacatggactgaattattccttttgttttaatttttctgaaaattgtctatgttgatactgtcaaccttgatcactgtgaaaaatcaaaccttcaagatttttgtgtttggaaaaagctttttgaagcatttttctaatttgttggttgttagcacttgtagacaaatctcaagcaataacttcaccattaaacatatctaaaattggtgataaatatgcttttccaaatgaaccgctaaattcagttacatctgtagttcatttttgatttggttgagttgcgacaaaatttctatttaaaatattgtctgcaattttgcctacagttcctttgtaagatttgtattttcttctaggacaaattgctttgagattgaatttttccattaatctgcgaactttttaagtccaattttatagcctctattattaagttcagcttttattcttctttttccatatcttgctttattttcgtcaaaaataagcttcatttggcttataatttcttcatttttcttgtcaaaatcttctttttgagttcataataaaaagtagatataggaatagaaaactcttttaatacttgagttaagcgaaggtttttgtcagcttttactctattataaattttttttattttttcttgccttggttgatttgagtcaaagatctctaccaaggcttttcacttttttagtacttcaatttccttttttaaaagtttattttctttttcaaagttttttttctcttttttaaaatgcttgagttcttctttaagaagtttgagttcttaatatacggatgttagagaattagattgatctttactatttaaattttttgaaacttttgaacgtttatcattaagaattttagatttcattattggtcttcctttgtttaattctaaaccactaattcccgattctaaatatttttttgttcaaaaagatatttgacttggattaagattattttcaagtgaaattttaacaattggttcaccagctaaaaatcttttaacaacacttaatctttcaactatagtccattctttatttcgtggttttttcctaaggccttgaactcctaatttgtcataaattttttctcaaaactttacttgatttaaaaaatttttctgacttgtattagcaaaatcgggctttttaatttcaattccttttttgtatttttttacacattctaatttaaattctaatgaatatttcataaaaatccccttttctattttcctaagaaaaggggatctgctcaaaatgtagttttttttattgaaactctattttaataacttgattttgaccaaaaatatgaactgacttgtctggatgaaaatgtgcttgctgatatgaaataaacattttttgttcatcatctgaaaaataaatatgtcaaacaataaaattttctggatatttcaaaaattctggatcttttcaaggaataacgttatttttagcaactacatttataatttgattttgtattaattcatcaaaagttttttcaattattttgttttgttttaaattaattttagcttgaacaagagtaatgttttggttttgtttaatgtttgcaacattctcattgagagttggagatttcactatgatttcaggcaatggttctttgtctaaaatttgttcatatttaaatagcgtgttaaaaaataattctttgaagtttaaataagttattttttttattaactttattttagcttctcttgaataaactgcttcaggattattaatttcagctcttggattacaaaaatctgactggttttcttggcaaggcttgaaaatattttgtcaaaaatcttctgaaaaagcatctcaagttttctttaggttattaatttgtgaattttctgaatttcttaggtctcttttttttattttttcttcaatatctcttcttttttcttcatctttttttaatttttcttctatttttagattatggttttcttgttctgaattacaagacaaaaacaaaaatgaaggtaacaatagagttcataaatagaaatatttaaattttttgttgttcatattagaaatctttatttaaaaattataacaaacagaataaaaaaataaaattttacaatttgtattttttgttacatatatcaagaaaaataaagtcaatttttataatttaatcaaaaaagaaaggaaacaaatttgaacttaaattataaagacattgctttaaaaatgaaggtaaaaattcaaagttttggtggatttttgtcttcaatgattatgccaattattggtatttttatctcttgaggtttactaacttcgtttttcattccaacaggatgaactccaaattctactttagcaggtatggtaggagttggcattaaatatcttattcctattttaattgggttttttgctggtaaaaaaatttatttaattcgtggaggtgctatttctgctttaatagcttcggctgttattgctgcaggagatagtgaaatttttaaatctattgcaggaaaagaatctgtaatgattttaggagttatgatactttcaccacttgctgcattagttttaaaacacactgaaaaaaattgaattcacaaaattaaacctggttttgaaatgttagtaaataatttttatttaggaattttaggatttttactttgttttcctgcgttttacttttctgcttacatcatagcttatataaatgtttttttatcattaattgtaggtaaaatgcaagaacacaaactctatcctattgttgctattgttgtagaacctgcaaaagttttatttttaaataatgctataaaccatggaatttttactcctttgggaacacaggaagttcaaaattcaggtaaatcaattttatttttacttgaatcaaatcctggacctgggctaggaattttattagcttgactaattttcggaaaagacaaaactgttaaatcacaagctggttcatcttctattattcatctatttggtggaattcatgaagtttactttccatttgttttactaaaacctattttaataatagcagctatagcaggtggtgtagtaggaaatacaattttccaaatctttgatgttggagcagttgcgcctgttagtcctggatctattattgcgcaatatattcaggtgaaaaaaactggaatggatttagcaggtctgagcttgggaatttttggatcagctattagttcttttttagtatctttagtgattttatatttttctaaaataaaacaaaaattctttagaaaagaagaaaaaaacaaaaatatcgacttagaacaagctcaacaattatctagatctttaaaactttctgataatagtaaaaaagaaaataaagctcatgatttttctaaaatttgatttatttgtgatgcaggaatgggttcttctgtaatgggaagcggaatactaaaaaaactattaaaagaagaaaacttaaacaatattgaagtactacacaaatcaatttctaatattgataaaacagaaaaatgcatcatcacaatctcatctttagcagatagaatcaaaacacaaaatcccgatgcccattattttataataaatcaatttttagatttacaaggatacaaaaatataatcaatgaaatcaaaaataaaaaataaagttttaattttcggagctggaaatataggtcgtggattagtagcttatatttttaacaaaaatgattttgaaattatttttgttgataaaaatcaagatttaatagatgaaattaatcaaaaaaaacaatacaaaataattgatataaacagcaaagatgaagtaattatcaaaaacattcaagcaattcatttagaagatgcaaagttaaaaacgtatttaaaacaatcaaaatatattacaacttcattaggatcaaataatttaaaatatttagttccttatttgcaagagcattttcaaactttttcgaaattacaatttattttatgctttgaaaatggttataaaatatcttctgaatttgctaaattattttttgatattcaacctaatattagatttattgacttagttgttgatagaataattcctagtaaaaaatccaaaaatatcgatgtatttgtagataatttttttgaagttatagctgataaaaatgaacaaaaaagaagcaaaaaacttaaattaattagttatgtcaaagacattgatgcttatacttttagaaaattacttcttgtaaattcacttcattcttatttaggttatcttggttatttaaagaaattaaaatttgttagtgaaagtgcaaatgatgtaaaaattataaaaaatatcaaaaatttagcttctattaatataaaaatactaacatcgaattttaaagaatttaaagaaattcaacttcagaaatactttctcaatactctaaaacgcttcaaaaataaacaactttttgatttaaacacaagagttgctagaaatccaattactaaaatttctgaaaacgaaagatttaacttaatttatcaaaatgttttgaaatttcacctaaataaacaacctattttagatgtatttaaatcaattctacaatttgattttgtagatgataaacaagctcaggaaattcaaaatgctataaaaatgaagcaaattaaacattttttgcaagaaaatactaaactaaatttagaagatatcaagactttattaaaggtagacaatgaacaaaatacttaaaaaagaaaatatatttttaaatcaagaattttatagcaaaaatgaagtatttaactttgtttttaaagtattttttagtaataattctgtaacaaaagaatatcttgattctatgataaaacgggatcaactatcttcagtagctttaggtaattacttactattaccacatggagatagtgattctgaaaagcacatacttaaaaacgatgtttgcattgtacatttaaaaaaagaattaaaatgggataatcaaatagttaaaataatctttgctcttgctttaaaaggtgataatcagatggaatttattcaactggcaggaatcagtttttctgatgaaaataaagtaaaagaattggtttataagcctaatataaacaaagaagaaattatcaattttttaaaaaatgtacaaaagtagtgtttttaatttaattttatataaaaaaataagcatatttaatttaggagtataattttgttgtagaggtaaattgtgttaagcaaaattagaaaattctacaattcaagaatcacttttctttttaaaataaataaatttaataagttgataatagaacttaaatatttatttttacaatttatctttaggttttttaaaaaatatactaataatatcggcagagtctcgctaactgtttttaactaattaaattaaaaaacaattttaggagacactatgaaaaaattattattccaaataggtgatgtatctcaacttgcctatgcttttcaaccagtagttcaacatcaaatggttttaagtaatactcccgataccacagatcctatgcaggtaccacaaattcctattgagccaatcgatatagttcctataagagattatgacaatacttatgaatcagccttatattttactagaccagaagttgcggattttgttgaaaatactcttgaaaatttaccaataggagttgaaagagaacagtttttagaaaaatggaaagaaaaaactaatgattttacaactggtaaattaactgaacaagacattattgattctattggtcgtgaaaattttaaaacaaaagacttaaatttaattaactctaatattgataataaatctaaaactttgactaaaaaagaaattaaagattcaagaagcattaataaaaataagtcaaatacaagttatataaaaagttctaacagagatttagtaaattctaagaagaaacaacaagatttaattacaagtaatgaatgagaaaaagcaaaaaaatcatttttttataaaaaagaaaaattaaaaaattatattgaatatttacattctattgataccaaaaatcaagtatttaatgacattagcattgctttaactgctgttgcttgaggcttagctgccgcttatactgctgctgcattttgaacatttggtgctacaattcctttagcaattagcgctactgttcaagcttcattatctacatgatttttaaaatcaagtattgatgaacaaaatgaaatcaaaaagaatttaatagatatagaaaagttttacaattcttatgaagttcaatttatgagtgatttttttaataaaaaatatagtgaaataaatgaaatatttaaagataatacagatgatttaaaaaaatgaaaaaatttcctttctgaaaaactaattacatacacatttgatcaaattatagaagaatttaataccaaatgaattcacaaaactattaattgaatggaaaaaaatagttttaaaactccactaaattcatgaaaagaattattaaaatatccagaagaaagatgtcttggtccaaaagtgacaggtctcgtaaaattttatagagcaatgaaaaatatagataaaactatagcagattttgttgctagttctacagagaaaagaattattattgtttcaactgcaatagcaaaccctataggtgagtttttaaattttttagatagtatgctctcatatttaaatttggttacaacatttgtaatagattacatacacaagtagttaaaagggtttatcgtgaacactaaattgtctgaagaactaatatacaataattttcttgtaaaaatttatagaaaaacaagtgttttatcttcatttttcttcattattgtatttcttttgtctgtttttgcatctttaaatgtaattgcactaaaatacaaatttattcaaattaaatcaacaaaagtcagtgatttttttaataacataaataattcaatttactgattaatattttgaatctttataattttaactattatttttttcttttatatttttatgcaagtcaaaaaaagaaaaaaaataataagtattttacctcaggctatttacttacaaatccataattttgattctaaagatatttttctaaaagaagtaaatttatgagatcaatatcaaaaattcaaaaatcgaaaaataaatgaatataaaatcaattatggtgttggaattttaagtagttgatttacaactatatgtgtgtgaattttaatttgaaaaatatttgcttttggtcgtagatttaaaggtgcatattataattatcattatattcctcattactttcctctaagaaaaaataaaataaaacactatttaattaaatttaattttactgattttcctgaattagaaagacagaaagaattttttcctgaaacatttgaaaattacaaacaagaatttatggaaaaacttgaaaaatattcaaattttgaagaatattttttagaaaatacagcaaaattttttaagtctaaaccttgaagcaaaataatagtgactttttgtctttttattagtactttttctctaatacaatttgctataaccatgtttatcgatctatacattaatgtaggtgtggttatacaaagtgaactagcttatgaaatttcgttttttgttatattaacaatattttctttattatgagttttaagtgatcaaattatatttgaatatcatttaaaagaatttattatctttaattttcaagtaaaagaaagatataatccatatttgaagcaagaatataaaaaactagtagataattttgatagtttagacaaaattgataagataagattatttgatattataaacactcaaattattcaaaaagtttattacagtgattagttaattagtatctaaattattgtttaacttttattaaaaatctactttattaaatatcaaaaaacagccacatttttttggctgtttttttaataacaatttaaaaaatgtcataaaatttgaatatataatacacatgataacataaaatattttaaaaacaaaatcgaaaggaattaatgaaaaaagccatttttaaacttggagatatttctcaattaacttatgctctacaacctggaattcaacaccagattaatgttgataatacttattatcaagaaaatttaaatacttcatttcaactaaaagatgaagcaaaaacatctatattaaacaacattgaaaatcattttaagaatatttcatcagaagaatcacttcaaatcaatcaattgatcgataatacacttaatacattaccatttaatgaaaatatagaagaatttacaaatttatgaaatcaaaaaaccaatgaatttattaataaaaatataacagagcaagaaatttttgaaaaaatagataaaaactatttttctcaagaacaattagaaattattaactctgtattatatgcagatgttgaagatattactttagaaagtgatgaagattttaatttacacttaccagaagaaaatttattagaagaaagctttgattttcaagacaatattaatctagtttttcctgcacaagatacaggattagaatttaaatcaataaattatttaccagattttcaaaaaagttcttttacttctaattattcttactattccaattatcaaagcgcatattatgaaggagatttttcattaacacctagtcaatgaaaacaaatacaaaaaaatcacattaatcaaaaagataaattgaaaaaatatatagattattttgctgggatgttaataaaaaacactttatttactacattaagcggagcttctactgcaattgcatgaggcttagctgcagcctacacaatttcagctttttgaagttttggagctactgcacctatggcggctatggcagttactcaagctacaatttcaactatattttttggattatctattaaagagatgaaagaaatgaaagaacaatatgattctctagtcacactatataaatcagatcatataagtgtaatggacaaaatttttagtttagattaccgtaatgcagtgaatttttataatcaaacaaaaaataatgttgattgaggaaatttttacaccattattacttcacaaatattgccttttaatgaatacataaaatcattttttaatacttttaagaattcttttcagatttattacaaattaaatttaagtagctcaattaactatattttaaaatctacaaatgttataaaattaatctctaattttaaaggtttttttaatagcattaattcttcaacaaagtcattaacaagaaaattacaatcatttgctcaaaagataatttcaagaaagttagcattagcggctacttcaattgtaaatcctataagtgaattattaaatttagtagacactataatttccatttcagatgtactcatgactagagttttagatatagttttaagcgtagactaagattaaaattatgacaaaagaaaaatttaaattttataatttcttaaatttcaaaattaaaaaattatcattgtttacttcatttttcttcattctgagaatcattttttctattttgttagctgttaatgttgtaattcttgagtttataagtattaatatttgatctaaagctaaagttgataaattatttgaaaatatacctttttttgtttattgaattttcttttcttttttattagtttcttttataagtttaataatttataaaagaattaagaacaaaaaacaagaacttttactaaagtgttatcaaggtttttattatttatttgaaaattttagatataaagatatttttttaaaagaaaataacttattagaagaatttgaaaattttatagagcaagattataaaacaaaaacaattacttttggttttattaaaatttttcagaaactaactttaattttcttttgaaacagtatttttggaaaacttatgtttagttttaaaactccttctgttccttctttatattatatgttttcttccaaaaatgaatattcttctgcttatacgcctggttatgatagaaaaagaaaaaacgaatatcaagattttttattaaattttgatttacaagatgaaagaaaaatttgtcctaatgaatcatttcaagaatttatgattaaagcgggtttacaaaaagaatgtatagaagaatttaacaaacatcaaaattttcaagatcttattaatactgagttttttaaattattagataatcaaaattttgtaaataagtgagcaagtagaatttttactttacaatttagtgctattttaatactcatttttaacataattatattatttcaattatctgaaatacaatttcacagtggcatttttttaggtttgtcttttgctatttgaatatttacaagtggactttgaagtttaattgagtgaagtatttatgtgaaaaacttagctttttttgtaatgacaaattttaataatttagatttaattagtgataaagtaagtgaacaaaacaaaaaaatattagagcattttgataacttaagcgaaaaagaaaaaataaaagtgtacaaaatttatcaacttacttctttacaacgtttattaaaaaatccgtacgtgtctttattgactttttcaaccttatttaaatataaagttaaagattaaatttcaaaatctgttttacaattaatatgtttattagaatttataataaatatctttattagaaaggaaagtatggaaaataaaaatattagaacaatttttagtgattttttaagatacaaactacaaaataaaacttattcagttatatctttttgagtaggttttttactagctccggctatttctcttttagtattttttggtttattatttaacaacttatttttctttgataaaccagatagtgaatatcgtcaagaaggtgacatattcagttttgataaaccaaccaaaccttcacaacaaatgatagatattcataataacataaatacaattatttttattttattaggaatctctatatttttagctcttgtttttttagcaaattttttattttgatatttaaaagaatttagaaaatatcctatatatttgaagggttttgcctttatttttaaagaagaaaatcaaatcaaaaattttttaaatgagaataaattagaacaagaatttgaagaatttaaagcacaaaatctagatttaaattctataatttcgcaaagttttccttttaatattaaaatggtttatagctattttaacactgcgagaatgtcagatattaatctaaaatttattaatacacaaaaaccttcattagttaaagcaaccaatttagaaattgacgtaaatcctgcatttagtctttctgatataagtaaagtttcaacaaataattttgatcaatttcttcaatcttctttatcaaatttactttataaagcagtattatataaactagcatcacaattagttgcactttttactttaatggcattaacttttgaaattgcatatttgagtgttcttggatcagattctcaagcaatagatttttcacttaaagaagttttttgaatatttcctttagttcttatgactactccgatatctttacaaagatattttttaattaatagtttaaaagcatgatttagaatttatttaacttctatttttatgataaaagaaagaattactcaagaaattagtgaagaaaatgaagaaaaattaagtagatttacttcaatgtcagatgaagaaaaaattaaaattcttgaagcttttatagaatataattttgaacaaaataaatctatatttagcgtgtttaaaggatttttcaatcctgtttcaggtaaaaaattaatgtagctgttattaaaaaatcattaaaaaaatcaagcaatattgcttgattttttgtttgtttttgttgatgtttatttttttgttttgtcaagtattaaataatataaaccaaataaagctgaatcatctccaaatgcatcttttttaaattctacactttttcattgatctggatttgttcaatgttttgcttttttaatagctttttcgattattcaataattatgctcagcaacagaaccaccaaagaccattaagttaggatttagtattcctattgtagttgagatagttcttgcaattgtgtcaatgcaatcatctacgatttgtttgtaatcttcatgttcttcatattttgctatgatatttttagcatcaatgtgttctagatttttatcttgagctcttaaagacattcctgtgcctgatgcaaataattcggctgcataattatttaaatgatgttttttatgaaaagtttttgatgtaggaatatgagcaatttcttgagcaaaaccgtttgctccgtgaaaaattttattgttaattactaaccctgcgccaaagccagtggagatagtataaaactgggtaacaccttttttgttgtttttaaagtgagtgtggtttgccaaagccatcgcgtttgcatcgttttcgaaaatagcatattctaatttggaattatttagcaagtattcttttatattaattccgtttcaaccaactaaattaggtgaagaaagaataataccttttttgtaatctgcaggcccaggaatacaaagcgcaattgcatttatattgtattgttttactaaatcaagaattttatccaatacttttttgtaattattaacatctgttttgaatctaattttttttacaattttgtcattttcaaaaagagcaaaacgagtattagttcctccaatatcaattgttgcaaaattaaattttttcatcttgaactcctgcttttatcttaattgtatgataatttttattattataagttgcttttcattttttcatatattttttattatctttaatttcaaataaatctactaattcgttgttattttgtactactcaattttctactgttgaaatatactcaattttatgcttattaaaattagtaattacttgatctgaattaattgttttaacttcttgatttgctagttttaacttagtttgtatagatgcttttattgtcaaactagagtttattcttttttcaataattacttcatttgccttcatagttaaaacaatactaccttcaattttgtgtttgtcatagtatacaacaaaaggtaaaaagtgttgatttttcttgttaaagtgcttaaattgaatatctaaaattctaatatcttgaagttgtatgtttaatgaagaatcgttgatgtatataagtttaaattctaactcttgtatgaatagattattcaaaaatttaatttgtaattttggggaaaaataaaaggaaaaatttgacatttttccttcatttttaaagatatttttagttatttttcttattagagagaacatctcatccaacaacactaactaaaattaaacctttgataatatttttttgtgattcttgaacgtttaaaactaaaagcccttgatttataacaccaataattgatgttcctaaaatagttccacttactgatccaattccaccatatactgatgctccaccagtaaatacaaccgagataacatcgagtgctaaatcatctcctctagatgaagtagctgatgagaaagtagctgtataaactattgaagcaaatcctgcaagagcaccgatgataataaaaataatcattgttgttcttttaacattaactccagataatttagctgcttttctgtttccacctattgcataaactgctctaccaaatgaagtattttgagttaagaaagtaaataaagctaaagcaattcctatgtataaaacaaagtatctcattgggttagaacctagtccaaaaataattccacaagctagaaaaagtaagaatataatagtttgaattgcggcaaaaataaagatattttgtgttctgattccaaatttttgttttgaaaaataacctcaaacccttaaagaaactatgatagctccaaaaattatcggtaatattaaggaaaaaattcaaacagttcctacttgaatgtcaggaattcctcgaatagttcctgtaatataagtagatgaaccacctccaataggacttaatgttccaccatttgaataaagaagttgagctcctttaaaagctaaaaaacctcctagtgttacaataaatgcaggaatatttccataacctactaaaaatccttgaattaatccaatagctgcaccgattattgtagttaatataaaagtcagtcaaatactttgccctgtattattatatatagtaacagaaaatagacccagcaatcctactagcgtaccgactgataaatcaatatttccactaagaatgaccaaaagcattcccattgccaaaattataatatatgaattattttggaataaaagtgtaaatgtatttggttgtagtaaagtaccatttgttatacctaaaaagatacaaaaaataattaagaaaatatacaacattgaaaattttttcaaatgatgtaatccattatctacgtaataaccgtatttatggttttttagaaagtaatttcaagactttttagttgtttccaactgtttactaataaattttgaaactaaatctaactttagaaatgaaaaagcatttttcatctcattaaaaaaattaaatttcattatttaacacctcctatacttagttgcataattttttcttgtgttgcttcagatgttaaaatttgacctttaataacaccttgagacataacaaaaattctatcagtaattcctaaaagttcttcaatttctgaagaaataacaataattgtcttacctttagacgataaatctagaagaattttgtaaatttcgaattttgatccaacatcaattcccttggttggttcatcgatgataagtaaatcaaattcagtacttaaagcttttgcaattacaactttttgttgatttcctcctgaaagagagtcaacgttgtttaataagtttttagttttaatatttacttcggatttttgtttttgagcattaataatttctttattattgtttaatataccccattttgaaaacaagtgtaaagcagcggacgttatgttattttgaatagaaaaaatttgaattaaacctacattttttctatcttctgaagcatacataatacctgattgaattgcttgttttgtatttttaaattttactggttttcctttataaaatacttcaccacttgaaggcttgttataatattgcccaaaaatagaaagcattaattcagtacgacctgaacctacaagacctgagattccaacgatttcaccttgtctaacatctaatgaagcatttttaacaacatcatagttggcaatggttgcatgaggaattaccatatctttgatttcaaaaattacatctccaaattttctgtttggatcttttgcagggaattttgaagttagtggacgaccaacaatgtcttgaattagtctgttttcatcgattttttcttcatttttgttatattgtgaaataaactttccgtctctaataacaacaatgttgtcagctacatattttacttcgtttaatttatgagaaacaaaaattgaagtaattccttgtttttttaggttcttcataatatcaagtagcctaaatgcatcttcatcattgagtgaagaagttggttcatctaaaattagtaattttgcatttttagatagggcttttgcaatttcaatcatttgttgttttgctactgaaattgttcctgcaatggttgtaggatcttcttccagacctaccatttttaaatatttttggcactcagaaatcattttatttcaatccacttttccaaatttggttggatatgaacctatgtacatattttcacaaatagataaaaatggtgaaatagaaagttcttggtggataattgcaattcctacattttctgaagcttttgtattatgaaaagacataactttgtcttcataaatcaaacttccttcatattgcccataaggaattacaccagataaaatttttaaaagtgttgattttccagcaccattttcacctactaaactagtaacttctccttttggaactgtaaaagaaacatcagacaaagcaacaactggtccgtaaacctttcttatgtttttgagggatagaatatttgatttttccaacttaatttcctttttttgaatataaaattagcttaaaattttaaataaattaataattattgtttcaaattttaagctaatttttatatttatattttgtttaaaataacttgaagttaattgctattttataataaataattttttataaaaaattaaataattattgttgtgttgctactgatgcagatactgttgcttgtgtaccatttgctcctggtgttggcgctgttgttggtaaaggattatcaacattggctttagtaactacaactggatctactaaaatagcttgaatttgttttgtacctgctttatatgttgtgttgtcgtatttaaatttaatgtctttagtattgttgttagtttttaaagcattttctatatcttcttgagttgcagttgcattagctgcttttttagttattaaagttcttaaaatttcaacagctactttacctaaaattgcatctggtttgtaaatggtcatattttgtttatcttctctaatgaaaggtttacttatatcattataatcttgacctgttataaaaatagtttttggatcaaaaccagttgcttctaatttagtaatagctgcttctgccattccatcattaggagctaaaaatccttttaatgtagatgctggtttgccatcaactgcgttcaatttattgacaccagatgatgctttgtttgtagttaaaaactgctctattctttgaccagcagttccgtaatttcatcctggaacataaactccattgcctgcaggacttaagtctataactttaccattagatgctgtcattaattcctttagaactttcatagcaccattgtaaaagtattgagagttattatcatcttgtgaaccagctactgcgtaaaatgaaataacttcagttggcatatgagctgttaaataagttttcatttcttctatatctttaaagcttccatcagtttttcccaataatcctgctgcaagcgcaagaccttggagttcaccaactctttcattatcatatgaaacatatcaatcatattttgttgaacctgtaattagtctatcgtaagcaacaacaggaattcctttttcggcaatactgtctactgctgttccgacacctcctccattttcaggagcaataataaatccttttggagctggatttaaattagcctgttgaattaatcagttattttgagtttcttggtttttggtgatatttgaagttgcaccatctgttaagtctatgtaattaataatttctttttgagcattaattcatcttggattatctggatctgttaatgcaattctaatagactcattagtaacagcatgtgtttttgttgatgcagaacctgctgtatcagtgtttccacaagctacaaatgcagcaaaagcagcaaatgaagctgttgataaagtagttaaatataaaaattttttagttataaattttttcattttattccttttagtttagtttttacatttaaattataacaaaatataaattacaaagaaatttgaagcaatttttagtgaaaatttccctttttttagttctataattaaaatcttgtagcaataattttataaaaaacaaaaaaactctttctatttatttgaaatacataacaaaatagaaagagtttaatttttaaaaattatttattcattatcttctggtcagtaagattttttaagtgggaattttttaataaattcactaatttctgattttattttttgttgtaattttaaatcttctggattagataataaattatgaattcattttcctaatttaataaagtctttttcttttaagcctctcgaagtcatagctggggtaccaaaacgaattcctgaagtaataaatgggctgagactatcgttaggaattgtgtttttatttgttgtgatatttacttttgatagcaattgttcagcatcttttccggttagattataagaggattttacatcaagtataaatagatgattatctgttccattagaaactacttttacattttgtgaaataaaataatttgcaaaagcttgagcatttttaattatttgttttgtatattttttaaatcaaggttgtaaagcttcataaaaaccagctgcttttccagcgattgcatgaaataaaggaccaccttgataacctgggaaaacaaatctgtttattttcttgctaatttcttcatcatcagtcataatcattcctccacgtgcagatcttaaagtcttgtgtgttgtggtagtaataatgtgggcatgacctactggagaaggatgtaaacctgtagccaccaaacctgcaatgtgtgcaatatctgctaataaatatgcaccaactttatctgctatttgtctaaatctagcaaaatcaattattctagaatatgctgaataaccagtaatgattaatttaggcttgattttcatagctaattcttcaattgcatcataatctaataagtcattttcatctaaaacataagggtgagcttcataaaaaattccactaaaacttattttataaccatgagttaaatgtcctcctgatgataaagtaagtcccataactctgtctccctggttaattaatgaagcaaacgccgcagcattcgcgactgaacctgaatatggttgaacatttacatatttaacaccaaaaagtttttttgctctttcaatagcaaggttttctactacatcaatgttttcgcaacctccataatatcttttaccaggatatccttctccatatttatttgttaaaacggatccagtagcttgcaatacatcttctgaaacaaaattttctgatgctattaattctatgtgctcttgttgtcttattaattcgttatttatagctttttgtaattctttgtcatttagtcttaattttttcataatactctcccctgcattttaataaaaaacactaaaaataaaatatgtatttttagtgtttgtaatgttttcaaaaagttttattttcttatgtttaaagcttcaattgtttctttataagaattaaagtctttttcttttagataagcgagtagtctttttctttggttaactttagcaataaaaccacgcattgaatgtttatcttttttattaacagcaaagtgtttttttaaagattcaatatcttcggttagtattgctatttgaactctagtatcaccagtatttttttctgaaccaccaaattttaaaactagttcttttttcttttcttttgaaatcattatttctcctttatgtattgtattttcttttaaaacctagaaataacccgagaaactgttataaccaagtaataaataatttgtaattagaattataacactttttaattatttatttaaagttaataatttaataaatgaatcagcttttaaagatgctcctccgactaaagctccatcgatgtcagactgatttaataactgctctatattttctggatttactgaaccaccatatagtattaatgtatttttatcggttttttcctttataaatttacatactttttgtgcttgttctggagttgcagtttttcctgttcctatagctcaaattggctcatatgctattataactttggataaatctacattttgtaatgaatgttttaattgatgttctataacttgattagtttgatttttttcgtattcttctaatgtttctccaacacaaactactggaataatgttatttttaatagcttgatgagtctttgcgtttacgtcttgatctgtttctttaaaatattgtcttctttctgaatgtcctactattgcatacttaactttttgttctaaaagcatttgtgctgaaatttcacctgtataagcacctttttcaaattgtgagatgttttgcactgcaagttgtaattcagttttatttaattcaaaggcagttgtgttaataaatggcacagcaacagcaaaatctaaattagaaataattttatttttattatttgtatataaactattaaattctgtaaaaaattctttggtttctgataatgttttattcatttttcaattaccaataattactgttttactcattttgtctccttaataatgtaatttatattttactattttttgcacaaattcaacacctttaattaaaaatttgaattcatgaattttgggtgagatttattatagttgtttttaaaataatttttcaaaaaagggaaaaaaataggaaaaagtcttttaaaagtacacattcataaaaaagtttattaaatgagtttatttttaatgttattaattttagtataggatttttgtacaaaaatattgttaaaaaaataaaatttgcttcaaaaatgaagcaaatttttttatattttaaaaaatttaaattttaaacttttaccttattaagaaaacttggaaattatattatcaaaatctaattcacttgtagaagaaactaccaaatcagcttttgaaaatacttcattatcttctattgtaattgcaacagccttcatatttgcattttttattgctaatactccagctggtgcatcttcaaaaccaatacactctgaaacatctaaacctaaacctttagctgcttgagtaaaaatatcacctgctggttttccttgttttacattcgcaggatttactataaaatcaaaaaaatcaataatttctaatttttttaaaatagtaggagcattgtaactactagaagctattgcaagttttaagtttgcttgttttgctttagaaatgaagctaaaaatattgtccaacaaagaatctttagtaatttcggtgtctaataattgtttataaagttcatttttttgttcacaaatttttaacatttcttcatcagaaagttttaaatctgattttttaagattgataatagcttttagtgtatcaattcttggtaatccctttaatttttcattatcttcttttgtataatcaatacctaattgcttaacaattttttgccatgcaataaaatgtaattccgcagtgtcagtgattactccatctaaatcaaaaataaaacctttaatcatatttaacctcaaaaattttctcttcttttgttatagaaacgggttgattatgaatatacataaaaccttcaaattccttctcagaaatattttttattgaaaatttctctttattgatacttacttcaaataatgaattttgatataaaaatctataaactaatttatctcaagcagaaggtaaaataggatctaaataaagtttgtcattatgtcaatctagtcctccaaaaccaaaaactatcatttggtaaattgcagctaaagaccctgcgtgaattcctgcatttgaagtgtgcatttttggacctagatctatattaattccgtatttaaaaattttataagctttatcaatcatttttaatctggcagcttctattgcataagtagctggcgaaagtgaagaatcatgggtggttatttcttcataataattaaaattttttcttcttatttcttcattataaaggtgtggaagtagatttaacaacaaaacaacatcagcttgttttactaattgagaagataaaagtctatgtccttcttttgtactaaataatttttttcctgcgtcaccaagcatttggaatggtctaacatcgagtttgtttagttttaaaaattgatcattttcagcaataattagatctttatttggaagttgttgaattaagtttttagaaactaattttaattttttttcattaatttgataaggaatttttttcttgattttttcccaaatttttactttatttttctttaaaaaattaatatattttagtgcaagatctatattttgttttgcgagcatattaatataagcattgttatcaatgttacctttgtactcatttggtcccataacatctaagattgcaaaagaaccatctgtttgtaattcagcacgatttgaataaaaaatagctgtatctatgatcatttcataacccattttatccataaagtcttcatcttttgtgatttggtaatactgatttacagcataagcaatatcagctgaaacgtgaatttcttgtcttctggaagcgattggaacttgttgtccactaactacatcaacttgacctcaatatggacatacttctccatcagttggtcaagccatttctcaaggaaattgtgccccttctaagttgctttcttgttctctttcttttatttcttttgctttatttcttgctccttttatccctttatatctataagtaagaagattttttactattttaggttcattaaaaagataaataggattaataaaaaattctgtgtctcagtaagtgtgtccttgatatccttcaccagaaagaccttttgctccaacattcatatttgtagaatgtctaggaacaaaaccatttaagtgaaaaataccaaaatctaaagctagtaaatcgtatttactttgttcatcttttccttcaatttgaacaaaaaattgatttcaaactcttgaatgcattttttctattgaagcttgttttagtgcgtcataacttgttttaagaagttgttcatgtttttcattagctctttgttttacttcttctttttttaaaatattatgtttgtgatctacagaactatgaacagacattaatttttctaaaacaataacatcacctggttttacttttagctttattttaaaacctaaataacggcgttgaatttctactatataatcgtctgttccacctttgatttgttttccatttagataaacttttgaaattaaattgtgaatgactcaacgatttgaaaaagttgttttttgttccatttgcaatgattctgaagttggtcttgttttatgaccttctccaaagtgttgtgttcctgtattggttacttgtgcatttatagctggttttaaaacaatttctacttcttgatcatcaggagtttgttcaacttttatttgaattttttgtccataaacatatctatcatctctagaaacaaatcgttcaaaatgtattaaaaatttccctcaatctctttttatttctacgtttctttctaaaacaccgtctctaattcaaagagtttttttgtacttatctcttgctttaacttcaaattcattggaattaattatgattggagttgtcattaaatcagcaagatttactaattctggaacatcttctttagtatcttggttaaaaatcccatttacatagaatccttctttgttatatgacattctttcttcatcagcacttcttattcccatgtgtccattagctaaagtaaaaatagactctgttttagcagttactgatttgttgaatttgatttgagaaattgattttttctttaaatcatattttaaataagacataattatcctttatttttaaagctattttttattaaaattgactcatatggtctgaaaatattttttactattttgttatctttataagaactaagtattgtttgtccttgttcaatattttcttcaatttgtgatgaagtaaggttcaaataagcaattaattcttcattttcaaagcatctttttatcaaaattaatccacttggtaaaacttcaaatttagaagtccctttgattaagatatctctaaattctttctttctcattttaattaactgttgataaaagtaaaaaatactatctttttcttttaaagcttttttaacgttaatttcttcagaatatcttccagtttttaatcaaaggttctttgcttgcgaaaatccagcatttttagagctatctcattgcattaaagatcttcctgcatcacgtgaatttatattcatatatttaaaaaattcattttcgctataaattttttgttcatcaactaaagttgtaaatccattataaatatctacatctctaaactggtttcttttgtcgaaatgagtgtttaataaacctatttcttcaccgtagtaaatgcaaggaattccttttaaaataaaaagcattaaagcatgtgttttagctgattcttgtctaaaaatattttcatcacctcaacgagaaacgcttctggaagtatcgtgattagataaaaaattagtaaacatataagacttaattttttcattgtgttgaaaaggctgttgttggaaaacaaaatttttataatctcaattagcatcgtagccgtttctacctgtttgtctacctcaaccaattcatcatcaggaaaaattaaaatagttttctgaaaccttattttctcctgcgccatagtataaaatttcatcagctgttatccctgatgattcacctaatgtataagcatctggcttgttagaaaaagctaatttattaaaagttttaagatactcaactgcctttggatttcaagcaaaataaggatttttttctacattttcaaaggtttttgatacgtgtttaatagcatctaatctaaaaccttttacacctaatttgtatcaaaaatcaataacatcaaccattgcttttatagtattaggatgacttcaatttaaatcaacttgttctttggaaaataagtgaaaataatatttttttacacttggaacatattctcaagctgaaccaccaaaaatactttttgcctttttttcttcatcacttaatgtttttcttcaaataaagtagttatgttctatgttatcttcagattcacaagcttttttaaaccatttgtgttgatttgaaacatgatttaaaacaatatccataatgatatcaattccaagttttttagccttgcttgataattctttaaagtcttttagtgtaccaaaattttttcaaactgatttatagtctaaaacatcataacctgcatctacaaactctgttttataaattggacaaagtcaaattgcatttattcctaatttttttaaatacggaagctttaaagtaattccctttaaatcaccatttccgtcattgtttgaatcataaaatgatcttggaaaaatttgatagataattttatcttctaatttaattgttttcataatttctctttattaaaattgatgattgaccttctaaaattccttctttttgcttgattcttgaagaaaaaagtactttatccttatttagcaatttataaaaatggcttgcttcagaaaagttgtggattacttctactacttcattattttgttttatttggtaagcaattattgctttttgtttatctacttctaaaaacttaatattatctttgatttctttattggttgctagtctgaaaaatcttgtttttgctctgtatttgtttaatttagatacaaaattgaagacattttgtttaactaactcattttttaggtgagttcattttaaaccatttgtatagtcagaagttttataagaattgggatgataagcgctattatctggttgttcattaaaatcatcataagttgaataaacacatttttctggctcttcacctgaattatcacaaggcttagattgaagtaattcagttccagctaacattaagtgcctaccttggctaaaaacactcatcattaaagcttgcctatatatctctatccttctttttaaaggtaaattcgcttttgcactcacatttattttatctcacaaagtaaaaccatcatgacaagctgcataatttaaaaccatcgaaatatcttcagcaaataaaaaataatcatctttagaatgagttatatttttaaaattaaaatctttgatatttcccactattgagctaacaaatttgacaaaaagatcttcattttgcttgataattagacctgaatttattgttgaatgctcactgcctttgattgaatctctaattgtgtcattaaaataagcaaaagctaaattatttgaatttgttcccttgatgtaagaattttgaaattctaaatctgtaaaaggtcacgcttctccgtggaagactaaattgggatttaactttcttaactcagttacaatttcattaatagtttctttgtgcataaaacacgaaagatcaaatctaaatccatcaacattgaattcttgaacaaaatatttcaaagaatctaaaattagtttctttgtcataagtctttgatcagcaagtggaggatacttaacgggcttaattttggcttcatttctgaagtaatatccatcaattatgttatttaaaatattatttgtcattaagtggttataaacaacatctaagataattccgatgttgtttttatgagcttctgagacaaattttttaaactctttaattcttgcataaggatcttttggatttgaagaatagattccattaatagaaaaataattatgtggatcatatcctcagttataatttgtgcttcattttgaagcctgtgatttataaatcattttttgttctagatcattaacgctaaaagcagaagcaattggtagaagttggatgtggctaaaacctaattttttaacatatgaaaataaattagcttctattgctgcatcgaaagttccaagcttgctaagaaattcattttgattttttaaactagtaaaatctctaatgtgaagttcgtaaatattaacatctacatgattgttatttttataaactaattttttaggtttttgacctgtttgagctgattttttattaataagagctccaagtccaactttattttcatcttcttgtcaattaaaaggggctaaagaaattgcataaggatcaagggcaaaagttgttttattattattgtgaaaaattttgtattgataataaaaacattcaaactgtaaaggaataaaagtgaatcaaatgctgccttttttaactgctttaaaagttgcgacttgagaagaaaaattagttttatcaaagactaaaacttctactttttttgctataggttgtcatagttttaattgaattttatcttttaaaaacttaacacctaaatcagattttttataagaaaatttttgatctaaatcatcaaaaaatgttttatttttcacagcaaaattatagttaaaagatatttagatgtaggaatttttctgtgttcttgatgtatcaaaatttagcaaatttttttaatttttgcttcaaaaatgaagacaaattattctttttaaaattaataatgtattgaaaattcttgatgataaaaaatgaaatgttctggttttacatagtacttaccagctatacaaattccaattttatcatagcctcaaaagtaaattactaacaattgattttgaccaaatttttctactttttcatactttaattcatagaccatattcttaacttggttcttatcatttaatatagctacaagcggtctagaaaaatctaaaatttcatcttttaaaatatcatttgctgtaatgtaaatttcagcatcaataatatgttcttcatttttgtagaactttttttcaatatatttgtaaccattaataaatttgatgtttttaccttcaaatcagtctggaatttctttatatttttcttcaccttctatcttatcagcgtgaagcaaaaaagaaataggcttaataaaattgtgaaagttttctgctataaaataacctcttttaggaacagcatatatagcacctattgaaaataatctttgataaactctaataacaacagttctagagcactgaaatttgtccattaaagcatgttctgaaggtagtggtctatttagtctacctcttttagaatttattacagaaagtaaataatctattactaaatttgttttggtagtggatgtttcctttttgttttcttgtgcacttaaaaattctctaacataattattttcattcatattaataaatattttaacaacaaaaaaagttttttaaaataacatttataaatcttgtgagcggatccccttttcttaggaaaatagaaaaggggattttttatgaaatattcattagaatttaaattagaatgtgtaaaaaaatacaaaaaaggaattgaaattaaaaagcccgattttgttaatacaagtcagaaaaattttttaaatcaagtaattttttgagaaaaaatttatgacaaattaggagttgaaggacttaagaaaaaaccacgaaataaaaagtgaactatagatcaaagattaaacatagttaaaagatttttagctggtgaaccaattgttaaaatttcacttgaaaataatcttaatccaagtcaaatatctttttgaaagaaaaaatatttagaatcgggaattagtggtttacaattaaacaaaggaagacaaataatgaaatctaagattaataataataaatctacaaaaatatcaagcaattccgatagtcaagatcaatcaaattcttcattatctgtatatgaagaactgaaacttcttagaaaagaaaataaacttttaaaaaggaaaatgaagtactaaaaagtgaaaagccttggtagagatctttgactcaaatcaaccaaggcaagaaaaataaaaaaatttataataaagtaaaagctgacaaaaaccttcgcttaactcaagtattaaaagagttttattcctatatctactttttattatgaactcaaaaagaagattttgacaagaaaaatgaagaaattataagccaaatgaagcttatttttgatgaaaataaagcaagatatggaaaaagaagaataaaagctgaacttaataatagaggctataaaattggacttaaaaagttcgcagattaatggaaaaattcgatctcaaagcaatttgtcctagaagaaaatacaaatcttacaaaggaactgttggcaaaattgcagacaatattttaaatagaaattttgtcgcaactcaaccaaatcaaaaatgaactacagatgtaactgaatttagcggttcatttggaaaagcatatttatcaccaattttagatatgtttaatggtgaagttattgcttgagatttgtctacaagcgctaacatccaacaaattaggaaaatgcttcaaaagctttttccaaacacaaaaatcttgaaggtttaatttttcacagtgatcaaggttgacagtatcaacatagacaattttcagaaaaattaaaacaaaaaggaataattcagtccatgtctcgaaaaggaaattgtttagataatagcgttattgaatcgtttttggaacattaaaaagagaatgtttttatggtcactgaaaaagaatttttaacttttaaacaacttcacaaagcaattgcaaattatatttattattacaatcacaaacgaattaaagacaaaataaaatgaatgtctcccattaaatttagagaaacattcatttcaaattataattaattaaaacacttaaaaattttagaagaaaagggtaccacctcaaaattaaattcttgttttttattttagttttaattttgtgattcagattttaaaatattacgaattttttcttttagttcttgagtattaattaatgatttttgaagaattttgtctttatttatgaagcccaatttctttttagtgataataattaagataatacaaataaaagcaaatatcattgaaattcagcatcttgtataatttattttatcttcaattggttgttgaatgagttttaattcacctgtatctggatcttcaaagttcactaatctaaaaactttatcaggttgtaaagaattaattgcaaacaaaaatacaaatacaacaggaattaatacaaataagtaaataaataacttatctccattgctaacttgtttataaagtctaatttgaatataaataagtaaagctaatataataaagctaaaaattattgttaaagaattaagagagtaaaaaatatcttttagttggtaagaagtagaactttgtaaaattttatctactggttgaaaaggtatgttttctattttgctacttactattcagtcatactctatagttattctgttagaaaaggtagaaaacatagaaaattgaaggattataataattaaaaatacaattgaaattagtgctaaaagtatttttcttgctaagtaattatattttgaatcaaagaaaaatttattattcattagtttaatctattttctgtaattttgtcaaaaatatgaattctggataacacaaattccacataaacttcttgataaagttcaaaatcctgatcatttggcacatttactataaattctatttctgaattaatacttactgcaattaactgatctttacctattaattctatgtttgaaattttaccagctactgaatttgctacttgacttgtatggagttttaaatcttcacttctaaaaccaacaacaagttcttgattttcctttatttttgaagctaaatcatcttcaattgttatttgaacatcttcaagagaatttactaattttttaccttttagctgagcatcaaaagtattcattgttggtgaacctataaatttagcaacaaaaatattagctggtttaaagtataaatcttttccttttccagtttgttgaattttaccatcattgaaaactacaatttggtcacccatagtcatagcttctaattgatcgtgagtaacataaatacttgtagtatttaacatacggtgaatatttactatttctctacgcatgttttctcttaatttagcatctaagtttgaaagtggttcgtccattaaaaacacaagcggttttctagctattgctcttcctattgctactctttgcctttgaccacctgaaagatcttttggttttctgtataaatatttatgaatttttaatatcttggcaacatcttttacagttctatcaataatgtcttttctttcatttgctatttttaaaccaaaagttatattattgtagacattcatatgaggatataaagcataagattgaaaaaccattgcaatatttctttcattaggaagcaaattattatatcttttgttattaaataacagatcaccttttgttatggaattaagtccagcaatcattcttaataaagtagttttaccacaaccagaaggtcctagaaagatacaaaatgttcctggctttatttctaaattaatattttctaaagtgtaattttcattaccttcgtattttttagaaatgttaaccaacttaatatctgcacctcttgttgagctatatacttgacctatttcagaaaccattttgtctatatcaatggtttcaaatcctgtttctaatagttgatcatcatctgaaataaaatcagcattttccttcatttttgaagcattatttttatttttaaacaatttttttaacatattttatccttttacagctccttcacttaaaccaccaactatgtatttttgtaagtacataaataaacaaaacgcaggaagtgaagcaagtaaagaacctgctgcataagctccagcattaacttgttttggatcggcatttaaaaatgtatctaaaccaactgctaaagttttttcatcatttctttgtaatacaaatttaggcaaaataacatcggtaaacggagttaaaaatgatcataaggctaccataattagagctggtctaataacaggaactaatattttaaaaaacaatcctcaattagaacaaccatctacttttccagaatcatctagttcagaagaaactgtatctaaatatgattttaacataaatgtattaccagcaatcgatcctcctgagtaaataaaaactaacataaaaatagaaggaattcctatattttcacccattttaaccaacatatataaagaaattaaagcagtagttgctggtattaattgaagcatcattataatagttaacgaatgttttgaacccgcaaatttaaaccttgaataagcataaccatttaatgctactgctatggtagaaatgagcattgtaagacctgcgataataattgtatttaaatatcaacgaccaaacaatgatcttgaacttgtaaataaataattaaaattatctaaaccaaattgaaatggcgtaattgctacaatccttggattttgaacgttaaacgctgccaaaactaaagaaacaattggaaataaaattatgattgctcaaaaaattaaaatgatgtagttaaagaacaatcaaataatttcagccacagtaggatctttggcatcagaagaatttagttttaatcttttaggctcaagtctttttttgtctactttaatcgaatcaaaactgtgtttataaaacctttttcttaatagtttatcgaacatattagtccctccttgacatagatttaataaatcctctagcacctactgcaattgagaagatagcagctagtgttgtaagagcagctgcaaaggcttgagatccttcaatttgaacactacctgttgttagtttataaactcaagaaataataatatctgtagaagcttcaccaaaaacggttgcctctttaaagtttgggccaccacctgtaaagatagaaattgtagtaaagttattaaatgcacctacaaactgacctatcaacatcggagctatggataaaagcagtgacggaagcgtgatgtgtcaaaatagttgtcttgattttgctccatcaactgatccagcttcataaatattttttggtattgattgtaaattaccagtaactagcataaaaattcaagcataagctattcaggtttgaacaacaattactaatactcgagcactacctacttcagataatcagtttttagcttcagaaatcaagcctaaagctaacattattttgtttatatatccttcatctccttctttaaatgctgtttttaaaaaggataaagtaacaaaggctggaatagctcatggaaggatataaattagtctaaaaacctttttaaatttaattctacttgaatttgttagcactgcaatgataataccaaatgagataggtaaaaaggttgaaaaaacagttcaaatcgctgttcaactaagtacacgacttaaagataagaacatattattgtctctgaatgttcatcaataacctcacattttcagacctactcaatcaacagtttttgaaggagcttcgtgtccaaatccgtagttagtaaaggaaattaaaattgaagtaataatcggagttgctacaataaataacataagcactcaacctaaaatagaaattactcaaggaaatccgcttgtatttaatcatcttttagtgtgagttcatttacttggacggcaaccaaattctaaatatttggcaacccgtcaagcacttatcgatgcagcaataaaatagataataacaaaaacaagaagtaaaactgaaattacaccaccgaaaaggtataatctagcatcagggaaaattcctcttgctgaatcaaatttatgagcacctaaatcgctaaatccaggaataccacccattttttgtcaataagcaccaaaagaaaaaggaataatcaatgctcaagaaaaaatagagaatattgacatcaaaatcccttttacatattgcttaaataaagtaatttcagctagtccagggaagatgattgacataataagcgctagtcatctaaagtttttaaaagtttcgattggaatgcttttttgtgcttcagtaatcttgctttcatatagctttttatttactttagtttcagaaaattctcttcaaaataaagtctttaaagtttctttagaagcaagtgattgagactggagctttagttcactaatagcttcttttttgtctattttatattcataaattttatgtttataagcaggttttgaaatttctttttgctttaatttgctttgtaattgctttttattttctttaaaagttaaactaatttgttttaaagaagttttaataaattctttttctttagcaatttgtttgttttctactaaaagttgataatcaactttagctagtattttttctgctctaaatttgagtcgtgaaaggcgataatctaaaaatctttcttttaaagcttttgcttcttcaaaaaggaaatttccttcatatgtatagctagattttacttctgctaataattttttatactgagattttaataataaactaaattcaaattcatttcttaatatatttattttagataaaaatactttaaaagcaaaatgataaattaatttagttttattattttcaatagaactagtttgctttaaaaatgaagtaagttcttttaaaatttcttcatttttcttcttaagttgttcaaaacttagatcattaaaagaataatcaagtaaaggaacatctaagttttgtttatgtaaaaaactggataaatctttataaagttgtattaaagctctttgcttaaaatagggttttaatttgctgtatttgtctttaatagcttcaattttttgcttggctgtttttaatttttgatcaattacttcttgattatgtttttcttgttgcaaaatcaagtttttttgttcttcaacttttaataaagattcttcttttttcttcttatttatagcattttgctcactaattttacttttgaacttatattctaagtcaagaatcttttgttcagtttcaagaataatattatgtttttcttgtttataaagtttgtattctagtttatgtgtttttaagtatttattttgatttttttctttttgctttaataaaaagagtctttgtttttctatcttttcgtagatatttttgaaaaaattagaagaatttttcccaagtttttttactaataaaatttcattatctaacaaaaaattttctattttatcaatttcaaaatttgtatcttgacatttttgtaaataaattttgattatgttataaattgtaaattttttaaaaatttgaatttcttcttctttagtgctaacttttaaattacttatgttgtttaattttgtttctaaatcatcagctgactttgctaaagaagcaacaaaatctttggtataagtttttgaatcttttaaattagcttttagttttttaatttcaaaattaagaagagaaattgttgaatcaacaaaagataattttttaattgtatcttttaaaacagcaattttgctcttataagcaattttatgagtagccagccttctttttaaattatctcttaatttttgtcttgctcttaaaaataaatctttgtcacgggcttgttgtgatttaatgttaatttcttgtctactaaaaagattattgacttgttttttataggcttttagattatttgatgtctcgggtaagatagtatcaaaagcttttccatatcagttatagagctttaatttttccatatttatctactttttcctttgtggattttatatcatttataataatgaaattgtctttgaatataatattggactaaaaatacaataagagcaataacaatagaaccagaaataagagaaataaaaattcctgtaattagctgaacgtcagaatagtaattgctaccttgataaaaaggtaaagcaattaaagtaataaaaactataattcagcaaataaagaaaacatagccagctcttaatttatgtcgcaagaataacaagtaaactaaaaagaaaatgatgactaaattatttgctaaataagaaattaaagtttttgtagctaactgcgatccaagttgtgaaattttttcagggcttagaagtttagtttgctcggtttgtttaatacctaaaccaaaaggaattaaaacccaaatcaacaacgaagcagttaacaaagcaagcaaaagcactaatgcataaaattgcttttttaaaatatgtgttttgtattttggatacattatacttctaatttaagtactgttgtaccttgttgtatagtgtttgcaaagtctgcaaaagttgtagaaaacttatcttctaaagctgttaaaaattgagcacgtgttttaacattattagctttaagagttttgtatcactcaatattacctaaaattaaatcgtttcattttcctcaaacacctgcaaattgtggattagaagaatcaaaacggttagtctgtgtatttaaagaccctaaaccattttctgcaatagattttgtagatgacataactgctaaaattttgtcaaaactaagaagtttgtcatactcttctaatttggaaattacatcatttaccttgtaatttgaaggagttttgtcttttttaggtatattgtaattagaaagtgcattctcaattacctttgatgttttagctgcatttacgtagttattaaagtataacatagctgctttttcaactacatcgtcagtagctggtgttttagatgatttagcaaatgtttttgctttagtaactacatcagaaattaaattatctaaagtattatttgtaattgcttcagaaattttagcaattaattgagcaacatcagtagttttgttatcaccatttgctccgaaaatcattttttctacttttctaatgtggaaagttttgttagttgcatcttgaactatatcattagatgctgctagtctatcaaattcaccttcttttagaagagaatctccaatttgtcatgtttgttggtttccttgtaatgaagaatctcaatcgtttgttagacctaaaatagcagctactgcgtttcttagtggaattgcatcttcaagtgaagaatttaatgttgcataatctgaatcttgtacgatgttaatttttttgacatcagaaagactcattttttcttttttaattatattttgttcacctaaaggattagctttgtcttcatctgatgatcaagaatttcagaaaattgcttcatttctgaagttaattactggttgtagtaataaatcagtagatgcttttaagtcttttacatctgtatatccaagttctgttgcaagatcggaaatttctttagttttagctttgttatcttcagaaatttttgtattaattgcttcttgtctgctttgagaatatggaactttagaatcttgtttaaagtaattatagtaaggttctacttcaaaaatgtttttaataaattgactaattgcttttcttctagcttcaggagctccattatttcttgcattaatcatgaaagatcaagcaccaggagcttgtttgtattcagtatcttcgtttacttttataacattaaaaaatgatttagcattagcagttctttgtgcaacctgaacatctcaagtaccgattatggcataagataatttatttgctgccattaattcgaaaattcttgattgcacatttcccatatcttttgtatataaaccttgtaaatcagttcgtgaaatatctttttgacctcaaggagtttgactatattcttcatctgtcataaaataagctgcattaataacaggtcaaagcacatcaactacagcttctaaaccttttttataaattggatgatatttatcaccttttataaatccagatgagtgtttatttggaacggctggatcagcgtatatgctttttgaagctaaagcctcaccaaagtttttaggatagcttgctttttcttcttcagataatgaatctcaataagctttcattccaccataaaaaattccgttaccgtatcatagatcttgtaatcttaaaacaatttcacctgattcaactagttcttttagtgtatcacttgaaggatttttaaacacatttcgggtttcaagttctgatttatttgaagctataataattccttctttgttgtgtctaattcctactaattgtgaaagtgttttaagtccatcttgggaaactccacttacttctccgaatttttttgcatcatttttttctgtttcagttagttgtacttcttttgcaatatcgtcaaaaaggtttggatcgaatttacccaaatctgctactgcgtttttttgtacaaaatcagttaatctatcttgcggagtataaaaaatatctggaactgcattatcattaataccttggactgaaaaatctaaagctgatcaaacgtctttggcaattgttttaattctaaatccttctttgtatgagtcagtttgattgaataattcaattgctttgttataaaaatcttgttgcacaccgtctactgcgatgtaaatgtctttactatcttttatatcggtttgaccacaagatattaaagtagctaatgtggtaccagttaaaattacgggactaaataataaaaatttattctttttcatattagattcctttttatatttttggattatctattcaaaagcaagatcatttttttgatatgccataattgtaaaaataaatgaaattggacttagaaatagcagtgcagaaatagcagctattatacccgttcatttattaaattctgtttttgaaagtatgtaaaaaatatgcaaagataaaaatatctctacaacataagtgataattaaaatagttattatgattctaaaattaaattcttttatttttgtaataaaagaaacccaaaaggaattttcgcttttagtgtttaaaatgttgataatagctattaataaaattaattcacaaataaatattattatgctagaaaatagcataaatagatattcaacaattttcggtttatactttctttctaaaggaagttttcccaaaaataatcagcgcaatttgtctttaagtgatatctttggaaaataaatctcttttttatgtttcataatcctaattaaattataaactttaaatcatctaacttagcttcaaattaaagcatttaattttattcttgatatatcaagcgaagaaagtaaagatacaaataattaattatatttttaaaattattgaattaaaaaattatccgtggaaaataatctattaaaaacaacaaaaaaatttttaagaacaaaaaagaaataaaaaaaagctaatattaatttttaataattattggtaaagtagttttatttaaaaactttttaaattctaagtgatttatataagtaaaaataaaaaaactccttcaaaacgaaggagcccagataagaggtcgtacttacattacgattaaatcctataggaatcagacttacctgtaaatctataataattatatattaaaattgaaaatatgcaaataaaaaatgaaatttcatattaataatcatatattttatttttaaattttatcaaaacacattcatttaaaacatagttaaatccaaaattcaattcgataatataaaaaaaatatattacataaaattattatttataggaaattgacaaaagacaattattatatgtagtgttactatctataaataaaaaaactccttcaaaatgaaggagcccagataagggggagtacttacattacacttaaaccacgaaggattcagcacttatctgtcatctgataatattatataacaaatttttattaatgcaaataaaaaatactattaataaagaataaaaaaactccttcgaaatgaaggagcccagataagcgggtgtactaatatgtacacttaaacacacgtacctgaccttatctgtttacgtttttattttaacacattttttatatttatcaaaaaatttttattttatttttcattacttttgtttgttaataataaaaaaactccttcgaaatgaaggagcccagataagcgggtgcacttacattacacttatacaaacgtacctgaccttatctgtttacattaatattataacatttttttatatttatgaaaaaaatttttattttattttgattacttttgtttgttaataactaaaaaactccttcaaaatgaaggagcccagataagcgggtgcacttacattacacttacgccacgcgccagaccttatctgtttacatacacattatataacaaatttttatatatttatgaaaaaagcaaacgatgattaatgattttattagactttaaaaataatcacacaataagcttaagcacattaagtaatataacccaaataccaagagtgaccttaaatagagatataaatgaattgaaaaaagctggaaaaataaaacgtataggtacagctagagctggttattgagaaatattagaagaataacacagtagtagtgaggtggtacccttttcttctaaaatttttaagtgttttaattaattataatttgaaatgaatgtttctctaaatttaatgggagacattcattttattttgtctttaattcgtttgtgattgtaataataaatataatttgcaattgctttgtgaagttgtttaaaagttaaaaattctttttcagtgaccataaaaacattctctttttaatgttccaaaaacgattcaataacgctattatctaaacaatttccttttcgagacatggactgaattattccttttgttttaatttttctgaaaattgtctatgttgatactgtcaaccttgatcactgtgaaaaattaaaccttcaagatttttgtgtttggaaaaagctttttgaagcattttcctaatttgttggatgttagcgcttgtagacaaatctcaagcaataacttcaccattaaacatatctaaaattggtgataaatatgcttttccaaatgaaccgctaaattcagttacatctgtagttcatttttgatttggttgagttgcgacaaaatttctatttaaaatattgtctgcaattttgccaacagttcctttgtaagatttgtattttcttctaggacaaattgctttgagatcgaatttttccattaatctgcgaactttttaagtccaattttatagcctctattattaagttcagcttctattcttctttttccatatcttgctttattttcatcaaaaataagcttcatttggcttataatttcttcatttttcttgtcaaaatcttcttttttgagttcataataaaaagtagatataggaatagaaaactcttttaatacttgagttaagctgaaggtttttgtcagcttttactttattataaattttttatttttcttgccttggttgatttgagtcaaagatctctaccaaggcttttcacttttttagtacttcattttcctttttaaaagtttattttcttttctaagaagtttcagttcttcatatacagataatgaagaatttgattgatcttgactatcggaattgtttgatatttttgtagatttattattattaatcttagatttcattatttgtcttcctttgtttaattgtaaaccactaattcccgattctaaatatttttctttcaaaaagatatttgacttggattaagattattttcaagtgaaattttaacaattggttcaccagctaaaaatcttttaactatgtttaatctttgatctatagttcactttttatttcgtggtttttcttaagtccttcaactcctaatttgtcataaattttttctcaaaaattacttgatttaaaaaatttttctgacttgtattaacaaaatcgggctttttaatttcaattccttttttgtatttttttacacattctaatttaaattctaatgaatatttcataaaaaatccccttttctattttcctaagaaaaggggatccgctcagtagtaatgctattttattaacaaatttattaaatatttttaacagtattgattagtatcattttggtatcattttagtatcatattggtatcatattggtatcatattggtatcatatttttgaaatttttattttaaaattttcaaaaaatgataatttttgctttaaaaatgaaggatttttagatatttatcactataggaattaataataaattttagtatcattttagtatcattaatttataatttaaatttataaaacataataataataataatataaaaatatttatttatatacaacactttaatgactcaattaaataacttttaattgagtttttttctattcccttacgaagatctcgatcgtacgtctgcaaaaagcgtaggaagcctaacttctgatgatattcacacttacgctaacgcacagagtacgtctgctcaaaatagtgacccactatttatagattcaccggatagatttgtgttagagaaatcatacggtagatttaatggtgatggaagatttatgtattcacttgaaatttatgatccaaataaattaattcaaaatgttccatttgataacaatcctggtggaggacaatgagcaagatacgagttatatgacaatggtcctagaacagctaatagcattttgtttcaaatgagagcaaaagattctattttaaattttagaaaattaacatatatttcaaattcacaggaatttaatagagttgatagtaatcaaacaatttctaaagaaaacgcacaggatattccaaactataccaataatttagattctaattctcaaattagttttaagtataaatatgaatttagtggatttactaagctaaaacaaggtcaacattatcaaagaaatgaaacatctaattatcaaggaaatcaaaaaggtccagaaaaaagaagattaaatacttatataagtcagatcgcaaattcaaataatccagactataaaactgtaaatattcaagtatcaaaaggaataagtattaatgcatcagacaaagataaacttttatctaaaataatttcggctaattttgatacttttacaataaaaagtaaaccggtattatatgcaaaaaattctccgaaatttataaacacatttcaaacaccttttataattgaatctaccaattgatgatttggtacagccaataatcaattagtatctcaagcaccttcacaattaaaacaagatactaatgtcttaggtcttagtaataatattgacactgaccaatctaataatacaaaatttggtattgaagagttaaaatataataaagacaataatactgtagaagttaagtatcacagagatagtaattcacggattcaaactatatttcctgaagttgcttatgcgtcctttgttaaccaaaaaggagatctttacttctttggaggtaaagatggacaaccactttcttatgtaaatgattttgactatacaaataattcaatgactttttatttaacttctgaacaaattccatacaatcaaagaccaaaatatggagagattttatcttttgtaggagttgttgtaattccatatttaggtcaagaccaaaacacagcaagttatcaactaaatccaggaaatagtaaaggaagagttagaataaatgctgcttctggatttgataatttcaatactatagactttcgggtaatgtatttaacaaactttgttaaatcaaaacctatatatcaacctatcaaaataggatttaataattgaatttaattaatttctaaaatacaaaaacagagcaaatttgctctgtttttgtattttataagaattttatttttacttataatcgaaactgattttatatattggttctgaatttacgaatgaagcaagatatattttattaaaattaatctcttttacgaattctgcattattttagttggaatgttgtttatctttactacagagttattttttatttgatatttttgactttgaatatctgaatttaagtattctgctactacaactttaataaaaaacaacactttttagtatctaggtctttgaatatatcaaatatttactgtaaattacaacatagcagataattatttactacaaacttcattcccaggagctgtttatgctgtttttgttaataaccaagggcaattgtacttttttggaaacaaaagaggtgaacctttaaattatgtaactgactttgattaccatcaaaatgcaatgtggtttaatcttcattctgaacaaataccatacgatcaaagaccaaaacatggagaaatactttcatttgttggagtagtagttttaccatatgtacaagaaggtcaaggaaaagttgaagctaagaaagggaaaggtaatgaaagaataattaaatttaaaactgctgctggtgatgcagaaattgactttgcttttatgtatccaacaatgtgatatgatacaaaagataattacaaagttattgagtataaaaaataatctcattaaaaatattacaaacaaaacagagcaaagttgctctgtttttgtattttagaaattaattatattcaattatcaaatcctattttaatacttttataaataggatcagattttacgaagttagttagatacatttttctaaaatctattgttcaactaagtgaatttgatgcttttatcattacttcaccttttttaccgttaggttcaactgtaaaagcaaaacttggtgtaccttcacctaaataaggaattacaactactccaacaaatgaaagtatttctccatgttttggtctttgttcatatggaattgcatctggtcttaaatagaaagtcattgtttcatttgtatagtcataatcatttctatatgaaagtggtcttccgtctttacctccaaagaagtagagatctcctttttggttaataaaggatgcatatgcgacttctggaaaagcggtttgaatttttgaatcttgttctctatggtatttaacctcaactgtatcattgtctttgttgtatgttatttgttcaataccaaaattcttgttattactttgatctgtgtcaacattaggtgtaagacctaaaatgttatagttattgtttagaagtgatgcattattacctgtgtttgcaactgcagaaccaaatcatcaagcatctgtacctattgcaaacggagtttggaaagtattaataaatttggaagagtttttagcaaataaaattttgttattttttatttctaaaacattaaaatctactgaaagtattttagaaagtactttatctatttgatttggatttccagtgccaggtcctatttgtaaatcaatagttttaaaatcagcattactagaacttctaacttctctaagatatgtattgattctggtatctattacttgtcttgtgtattgttcttgaggatgatttgcattatcagggtctacgttagatactatatatagatcagttgtcaaattattttcatatttatatttaaaatctatttctgaagatgtatctaaagtattagtataagtaggaatatctagtgcatctttttgagttaagttagcgtttttataattaaagctatagtctcctttgtcatatgaaagtcctctaaagtttaatactgattttttagctaaaagatttaatttaatttcatttatactttgtcaaacttttcgtgattttttatttatttgatttattggtgttttagtagaatacaattcaagttgttgtcattttccttcaacttgaggattatcttctttatttacattttgaatgattttatttggatcatagacttctaatgaataaataaatctagcatcacctaaaaatctaccgtatgatttttccaacacaaatttatccggtgaatctataaatagtgggtcgctattttgagcagacgtactctgtgcgttagcgtaagtgtgaataacatcagaagttaggcttcctacgctttttgcagatgtacgatcgagatcttcgtaataagaataagtaaatcttaatcttttattcttagaattagaattagaattatcttgttgaattttttgattagtttttactcatttttttgcactacctttcataaaaatcttaacttttgtagttttagcactgttgtcatgagtaacttcaacattatctaagaatgtaacttgttctttattatctgttcaaaactcaaagtttcaagcatttcgagcattattaccattatttgactgattttgtctaccagatgctgaagaagctatatatcctttagatggtgaaccaattttatctttagctaatgcattatttttatcaaaaaattctaatgtaattggagcaatataagtattttcttcaccctcttcattagtagttttttccattgttattgattttaatttaggttgtgatactttagtttcaaaaaataatttgtgctggaagaatttaagaatatcatctgagattctagatgttaaaactgtatttgagttatttttcaagtttttatcaactaattcaacactgtgaattttatatcttgttccatctgttacatcattgttttgtaattcaaattctgcttcaaaggttttaggtcctgcttgaactacacttcgtggagttctaattgtagcaattgtttttgaagttttttcactaccttgctcttgaccatctttaaattcttgatattttagtttaatttgtttatttaataagtatttatctaaatcaccattaaatgttaattttaatttaacagttttatcggtattagaaacttgcacaatatctttaatctcaaagtctttagctatagttttaaatgtttttgatacattaggcataaaggcaatattaactggtgtattaccttttgaaaactgtagtgattcaatagtatattcttttaatttatctaaatgtgataaagaaaacttaatttcgttagtagtattattaaagattacttgtgaataatattttacattgttattatcacgtaaatttaatattactggtgtattacttatttgacgatctttagaatttaatttaaatactaattcagcactagtttcatctacagcggcatcaaaggattgtatattagtaattgtataaaaatctttagttagtcttgaaataccttctacttgtacaccttgttttaaatctgttgaagaactagaatttaaaatttgtatttctgaaattgaatattcagttgcagctttaatttgttctgtgttggtaaattctacatcagcgtagactaaaccagtattatctacttgaacttgtgctactttgttaatattttggttttgttgtgattgatctgacaaactagcagttttagtttgtagttttacatttatatattgattgtttaagaaattatctactgtttggaaatacactctaaatttagcttttacgttattagcttgacttggttgacttgcttcagtagttgaaaactctgaatacttataatcaatattggtcacagttgcttttgataatatagttgaaaatgtacttgttgcactttgctcaatgttatattcaatgttatcaataataactttttgaattttatacagagtacctttttttagaccttttaagttaaatgcaagtgtgttttgactaatattgccaaatgataaattagttttttgttgtgattcttggaaaatatcattttggttattagaagctaatgagctttcagcaaaaacaatataagcagttttttgattttgaatctgttgccctggatttttgaatcttaaagtaacagtagctgaattttctgattgagcactaaaagcagtttgaaattgagctttggtttcaaaatttttatcattaggttgaatagaagtattaaactcagaatcattttcatttgcaataatagcaaatttttgtgtatctaaattgttatcttgaagatctttattaaaatctaattgtgtttcaatttttattttttcaactatatagtcagtattaggatttaaacctgttcctgattcacctaatttaaactctgctttattttcttttatttctacttcagtagatattttagtttgatttgagtttttttctttgtaatataatatggctcttcttttggctctagttaaatcttcattagtatcatcgaaaaatgctataactgttgcttttgtttcttctaattgtgaattagttaagtattttaattcttttactttagatttagaagctggggttgtataaatattagcttgactttgttcaggatttagataagatgacattaaaacagtttggtcattatatgttgtagataatatcctataaatagaagcttttttatttgttaattcaaattctactctatagtttccgtcattatctgatggacttaatttagttatagtattagctgctgaaataatttcaacttcattggtcgataagtttttaacatataaatcaaatttacttttatcttgatcatttagatcataactagttgaataataaacagctatttttgtatttacggctgttggggtttcattaacttgaattttataatcataagtagagattctaagtggttcaattaatgtagtttcattaattttcttagaagttactttagtatcttgtttaaattcaaaatgtagtttttgtaaatcagctgatggtttttctaattctatttttttaattctatatctagtaccttcaactaatttacttttaggagcatctctttctcattctgttgttgaagttcctatgtcttttactgtattagtttttgatattttattgttactatttattgtattttcaactaatacaactttttgtgtatctgattgagtagtatcacctgttaaagtaaattttacagaagagttaattatttggaaattttggtttaataaagtagttttatgtgttatatcatttcctatttgttgaccagtatcatcaattctttcgtaagtaattgttgcagatgaaccatttaagtaagtatcatgaacatcatcaaatttaatatctacaacagcttgtgtacctctcgcatctggataatttactttaatatcttgaataatagctctagtaggtttggtataaaactcacgtttattttgttgatcaatttgctgatctatttctaaaccacttgctcttgcgtttggattttgatcatcacctaatttgacatttaaaactttataacgttcaagtacttttagacttgataagttaaagttagctttatattgtcctctttcaagactaatttgctgatttgattttaatctaactattattgaattatctttttgtgattgataagtaattcaagcatatttgctagttaacgcagtatcttctgagttaatttgaatatctatattaccactagaattttctaagtttgtagattctagagtttgtacaattggctgagttctaaactcagattcagcttgtgataaaagagttgaagctgtaacatcagaagaatttggaatatatgtttctaaactaatttttgtatttactaatttttcagtatctagttgtgtagtaatatcgtgaaaatcaatagaatctattttataaacagcaccagctgttaaatcagtatttataggattttgtgctaatttttctttatcaatttcaactcttgcaataccttcgttgtcaatagttacttgtttagtaacatattgattttgtgaagcattacctgaagtttttttgaatttaactgaaattgcattacctaaaaggaaataatctttttgtggatcaaattgaatattaactactgctttatgtgcactagaatctgtttgtgttactgatactaatttagcttcatttgctgtggttttaaacactctaggttttggcaccatctgtggatcagatgagtttaaattatgagctcaaggaataacttcattattaataaataaagtatttatatgatactcagagagtttatctagatttgttagttcaaattctaatgtactatttgtaaaacttgttggttttacttcaattatgttgtttgagtgctgtgaaattaattctaatttagttttatcttttaaattagtatctttaaatctaccttcagaatctgataaagtaatttgtactcttcttttagtatctgcatctacagaagtaagagaataagaatgttgtgaggaaactgttgaaattactgattgtgtaaagaatatgtttttgttgttagtatttgtaaatacttggcttgtattaactgatatgcttgaaatgttgttggctttatcatcttctacttcaagtttttcaacttcatattcactaccttcatttagttgttttaaatcaaaagaaactgttgaatcagagactttgattgcatctgttgttattggctgactttgttgatttgttcctttgattctataaactagttttacttttttatcattaattaaataatcaactaatctatcgaattcaaaagttaatctattttctgttgtagaaattttttcatattcaaatgaagtaattgaaactgaagtaaatgtagttgtaaagtctttgatgtggaaagttttagtgttttgttgttgatttagattgtcatattcttttgcaaatggaattaaaacttctctttgtggattatttacgtttttaataattaaagaaggagaactatattgagttaatttagataaattactaaaactaaaggttgcttcattattattaatagttgcagtagcagaaataacaccatctggaccattaaatgataaagtagctgaatgtgtattaaatacctgtgctgaatcactatttaaatttttaaatttaactttaacattagcactatcttgtattaaattttctgtagaaatttgagagataacaccatgagttgcaaaattagcttgggttatagttgaaatattttgctgatttcattctttattatctaatttaaatataggttttaatacattatcagaatcagctaaagtagttggctgtaaattagaagttggagtaattttttcaatacctacttcaaaggatttaatctcgaattgagctccttcttctaagttagttaaatttgtttctgcttgataaataccgtttttgtttgtaattgtaacgtcttttgtctcggttcaatttctgttagtattttggttttttgcagcaaaaacaatttttacttgtttattgtctaagtaaaaatctatattagaatcaaagatgacgctaatgtgggctgagtctgtatttattttatctactttcacatctactagattaatttcagaaactattgtagcaaaagcttgatttgtttttgcttgctctgagatagtaattggtgtatttcctgcatctgaaactagtaatacattttcaattacgtattcagaatatttttctagattttttaattcaatagtaattgaatgattagatactttgttgttagaatcagatgtaacagaaaatatatttccagttcttacttgtttgtaaaatacttgaatttgtttttggtcatagaaattctctgagtctgagaaattaatttttacttttgcagaattttgtttgatttcagagaattcaaaatttttaacttgtgatttagtataaagttttgtctgatttcagtcatgtaatctaagatctggtttattaacatcgctcatttgctcaattacataagtagaacctggatctaagttatcaaaagtaaaatcagctgttaaatctgagtttatttgcacttctttttcaagtacagcatttgaatttagattttgagttgtatctgctggctcagtttttttaagcttaatttttattttgtcattatataaataagcgtcgctaaagttgttaaagtttagagaaactccaacagaagttagttcttgaacattttggtaaatattaataatttttgcatcttctgcaagtgtttttcacttaatatcttcggaagtgtctttgtttatatttttatttcagactagattttggaaattataagcaacatctaaaattttataatcagtaaatttagttaagtttttaagttcaaactttaaagtcttattattttgatcatatgaattttgtttttgagtaaaaatagtttgatcagaaagtctttggtaaactaaaattgcatctttaatatctttagtttttggatcagagttttctagtttaactaaaatatcaatagaatcttgtttaaggatttctttttgaaatgaaccaacacctaaataagtgtaaaactctgtttgtgtattaggatcgttggttttaaagacaaatttagtatcagcgatatcagtttgtgattcatcaactttaacatttactaatttgtatttagatcctgcttctaagtctttaattttaaaggatgtattaagacctaatccaactgtagtagcttctgattcaaaaactgtagaatcattttctttttgataaagtaattttaattttttatcagctaaaaataagttagctcctaaatcaaatgaaacatcaacagttgctgaattaggcattatatcatttactttagctgtagcaataattacttgtttatgaggtgtagtaaatgaattatttggtaatgatttaatagtaatgtcagtaaagttaactaaaagaggatctaaataaacatttttaatctcataagttgtttttttctgtaggttatttaatttaaattcagctacaatttcgccattttcttcttttacttcagtatctgcaaaatcattagaaactactgtatcttttgattcatataaaagttttacgtttctagtttttttgttttgtaattgttcatttaaaagtgattttgtatagtcaccaaaaactaatttaactgtagctgatgtatctttaagatctttaatatcaattgacttaacaaatattttagttgcaaattgatttgaacttaaatcattttgtttagagtttggatcaaatattaattcaatttttctttgtggatcgtcagctaaatgaatagaatctagttgatatttaaccccatctttaaactcaattagactaaatttaatattataatctttggcttcaacagcagaagaagaaataattggaccaaatccatcttttgcaccttcttcagatcctgtgtaatttaattgtttatattttaaaataaacttatgcccatttaatcaagaaaataaaggagtaaatccaatgttgtattcaactgaattaattttagattctgggaaagatttaataaatacttcaacatctaattcatgtgttgtaaaagatcttctttttgcatcttttgtattttctagattcttatcaaataaaatctttttaacactaattggttgatttggttgatcattagatgttggtgtgtttgtatcatcaaaataaacaacttgattattttttaataataatttaacagaatctacaaagtattcagttttttggaataaatcatttgcttggaaattaaggtgataaatatttgttttgcttgcatcttttttaactaacgcagtaatttttttaccagagattggagataaactaagtgaagcttcttgatcaacaatcaagtcaggatctaaagctgatgcaaaagttatattaatatttgcacttgaggtacttactttatcaaattgaatatctgtaatttgtgtagaagatgaaaactctctttgtttttcgtttattaatttaaattcaattccagtatttgcatttttgtctttaatataagcatctgttacaaatactttttcaacacggtattttgttcctggttctaaagtattttgtgaattagtactatctaatttaaattcagctatttttgatctaattacagaatctaatgtaaataatttaggacttggattttttggatctacttttgaatattgtaatttaacttttttaccttctaatgatgttttattatcatcattttcatcaaaacttaataataaagtttttgaataatcatcaatatcacttgcagttatactatctactcaaacagtatttgcatgagtgtcaaaacttctattttcttcagataagtgattatataagttatcaatttttctagatgcaaatgaatcaggagaaagttgttctattaattttactgattcaattacatattttctattaggtgttaagtttttgattacaaatattgctttttgatttgctacagtagcagaatcaacgtaagaagtaatactttcttgtgataagtttttagttttaactgacaattcctgtgaaacaccatcttgtgagatgtttgtattgatgtagtgatattgaagggctacttttttattatcaagtgaatttattgagtcattaaagtcaactattacatgtgcttctttgtttgaaatattattaaatgtaaatgacttaactgatgcttttgtagttacaaaattgttagtgttttctgagaaggtaaatagttttttaatttttctatttttatagaaattattttgtgcttctacttgaacataatatctacttccagctgctaaagacgcagattcaggttgaacataattatattttcttgaaaaataatcatattttgctttagtagatacaactttgtttccttgttcatcaactaagtgcacatttaaatctgcatattctaaatcatatgcatcttgatctgcaagttcaaaactaaaatttactgctttatctgtagttagattatcaaaatcctgttttagatctataactttatactgaataccttttcaattctttatcaaatatggaattaaaaagatagaaccaagcgaagctccagcaatggctaaagaaactatagcaagtgcttttttcttaaaagatttattttgttgtttcattttactccttatagttttgaagattatcttattttaatagttctatgaattttatatgcattagttggatctattaagaattgggtttgaatatattgagtagaagaaccttgattttggctagatgtatcataacctgcacctgaaatatctttaactaaaactcctaaaaaagttagatttttttgattgtatataagattattcttgagtgaaaagtttaattctacttcatcttgagttctaaaacttgaggcattaaataaatttacaggcaagtttaagtcatctccagcaaaataaattttttgatcttcatccataaacattgccaatgcagctcagttatttcatccacctttcatcataaaattattaggtcttgataaatatacttttacattattaatattggaatgtggattgtaagtccatcttttaatatataaattacttgttaatgcattgctaaaatcagtttgtgaagataaagtatttgatgagtaatttaaagataaattattattattattattttgttttttaaaattaaaggggtcaaaacctttttttaaattaccagaattaactcctccattagcagtgtctatagttataaactcatttaaagatatcatcggatcaattaatcatctttttcttccacttggattatatatggttaaattgtttgtttctggattatcagaatcttgtaatatttttattttgcttaaatctagttctgctatttgtgcgccaaacagttttagtgtttgggtttgggttaaatcatagaaaaatgtaacaaaagcataatgactactaaatatatcttctccatcatcattactatttcgtttagcataatcagcagctgataaagtttgaatatattgaggacgctgggaagctgctattaattgagttgcaacacctgattgtggagatatactattatcatttccattaaaaatttcgtttatatccttatttccagttcatacattttcttgagttgcaatagtaaatcgattattatagttaaatggagtcaccttaatatccaccggttcaaactgtaaattaaatgattgtttgttaactttttctactgttcatctatcatttgctcaactgttttcttgatcattggtggttttaattaatcctgttggatcgtagactgctatggtaaatccaaataagtctttatcatagttcattgttgaagtagcttgctcaatatataacttaggtctaatcttagtttttatttcttcaccataaactgttttggtaataccatcatgaccaaaacgagatgtaaagtttttagaaaatactgtttcaacataagtttgagtttctattcagttatatgatgcttctataacactaactttaatgtcttgacctattaaagatttaatatctgtcgcttctaaatcaaatgaaagttcttttacaccagggctttgatcaaaactagcattttttacttcataaccatttgatgaagctgtgtgtgtattatcttttgttcagtttaaatatagttcttgattattgaatttaacttttactattgatttttccattcatcaattaaattgtgaatttggaaattttttatttgaaactaaagtattgtttggatcgttgaatttaagttttaaagtggtttttcattttccattcaattgtaatgtagtctcacctgcatagagcctttcaactgttggatagtcataaatagtttggaagatgatttgttggtcttcaggtatttgttgaacagatgtattaattaaaggatttgtttctgtaccttgtagaacttgtgtgttagtgttttgtggaattcccacagctattttttttgtattacttgctagagatatttctgtaatttttgttacttggaatttgtgtccttcatcaagtgtagttttttgattgcttacttgtccattttgttgaacttctgaaacataatctttactaatgtcaaatcttaaaatgtttttatttgttaatgattgacctccgaaagaatcattataatcatttcttacttgtacaggctgacttgatatatattttttctgagtttttttatcttcaaattctatttgatatgatttatctttcataattgcagcatttaactcattaacttccaatattaatgttgtttttttagggttttggatatcaactgcttgaatagtttttaaaatatcaattacatctccagaagtttggaagtgttttttagcttctttatcccctcttggattaaatgcagaatcaaattgaattggttgattattttgtggctgatttgaggtggcattatgagttactgtttctacagtgtaattggttcatttaactaaagaagttaaattaaatgttgcatatacttggttttgattttgattatcttcttgaaccactgcagcaacttcttttgtattatttgatgtattacttaatccaatagtagaaccttgcttaatagttaattttacttgctgtcctcttaaagttttttctttatcagcaaaaaccacttttacattagcactatgatctaaagctcttgtttcttcttgattattgttatttggattttgaattttatctaattgtatatcacttacttctacgtgagtataaaaggcttttctgtttacttgactttcttggaatgaagttgtgttgattgaattatctagttgcacactaatagaatacttaagtgaaataattttttcaatttcatatttagtacctggtagtaaattatttaattgatactcaatttctaactcattaccttgttgtcttaaacttgctggttgagaagttagaactacattatcacttgcatttctataagataatacaatgtcatttccattatcacttaacaagaacttatcatcttgttttaatcttactttaactttagcagatcttgtagtaatttgttcatatgttaagtaagtaatatctgcagttgttgctgcaacatcaaattttttgtctgggtctttaacagtatcagcaaattttatttgggaatttgcaaatccttgaactcgagttaaatcagtttctaattttactatttgatactgactacctttttctaaaccatctagattaaataccactttattatcagctgctgaaaatgaagcttgtttagtacgagtttgtccgttattaacaactattccttgttttactaattgatatgttaattgaagctgtttattttgttggatgattttattattattgtttaattcaattgtaacagtggcttgtttttcaaatgtagatactgatgaaatagatttaatagatgtattagtataaatggtgttgttagtaactggttctggattagttatagtaactggtataacttgtaataacttaggatcagttttttgaattgtattttttaattttaattgaatattagtaatttgatattgttgaccattagatagttgactaacattaaaaacttgattattttgagttaaatcagttcaattaattactttttgtgcttcagatttatcaacactttgataattaatttgaacttgatatttgtttaaaatattttcttcattttgatttacttttaaagtaaattcacctgaatcatctttattttgttgatttgcactaacttgaacatttacagaatcaatatctgtttcaaattttttctgttcattgtcaaaagttgaaacaaaattgtactcaacttgctgacttgaagttgattctgttaatttaattgctttaatttggtatttttgaattttaactaagtcgtttaactgaaaaagaaattgtgagttagataattttgttacttgagttttagatatttcaatttgatcattttctttggtaaatactatagttgcgtcagtatctttaaattctttattttgggaattatctaaagttactaaaacatttgctgttgtttcagatgtatttgtaacgattctagagatagctacttctgttttaaatatttgttgttgtgaagtaactttagtttgatcaatattaattaatgtagtaatgttgccttgtaatcctttttggttttccatatcttgattagacatgaatagaccatcaattttatattcactacctgcacttagtttatcaagttcaaattcaatagaatattctccattagattctgttacttgttttgcttgtgtagaatatttaggattaccttctaatatggcagtatattttagataaagactaatatttttatcttttaagaacttatcttttgcatcaaattctaatttaacttttgctttagaaatttgatctgatgttgataaactattagtttcatcagtaatttttacaactgttgcatattcagtagtagttgtaaattctttttcaaatttagcaggagaagaagaagcaggagaagaagattgaacctcttcttgtaattttaaatctttttggttttgttttaaacgaacctcagatactacatattgagtgtttttatctaaatcatcgagtaagaaaatcgccctactactactactgataaccagtgcatctttaagatttaaaaatcgatttggttcatttttcttgtaaacttttaaagctaatgtagaaccattaaagatacctgcagtatcatttaattcaacctcaatccttgcgcttgtatctctgacttcttgttgtggaattaaaatttgttttattgatgttagtgtagtaaagattttttgagttggtaaaacagtttgtccaaattctattcttacattttctggattatcttgatttactttttcttgtggtaaggtttgtgtttgagtataacgaacgcgattgatttttgaaccttgttggtattcaatagaagtaatttcgtattgtccaacttgtaaattagataaagtaaaacttgctttatatgtgtttgttccattatcttttgttgctattgctgtaataggttgcatacttgatgaggtattatttacatttctataatttaattgtattttagtaaattcatttaaataattattatctgcagcatcaaaacttacttctaattgagcagaattagaggtaatgcttttatattcaatattagtaatagattgagtctcaggaatagttttaaatatttgtcctgttttttgtgactctattaaagctgtttgggaatttgtttgtaattgagtagctaaagttttgtgtctatcatcaaagtttttaactaaatcttctgttttaattaaaattgaatcataatttgtagatgcactagatttatctgctggatttcagtataaacctaaaattttatagttttgatattttactaaatttgttagactaattgctactcttgaatttttaacttcaaattcttgtgaagacatttcttgatcttttagttgttcttgttgatttttaatatcaactttttgatattttaaaacaactttgtgaccttctaattttcttggtgtgtctttgaaaaatacatcaatgtttcaactagtttctgaatttggatcggatttgttttctattcttgaaactgctggtaatgtaccgaatgttttattttgttgtgattgatcatcaaaagttatttttaaatctgaagttgcactttgtttgtcatatgaaataccagttacaataatattagaaccatatggaagattagttaaatctgcttcaaaatttgatgaattttgtttataaactaaattagcagtttgaatcttaccacttccagaagctagatatctaagttgtaagtgttgttgataagtggcgtttttacttaaaaatgaatctagttgatcaaaagatacagatacttttgctgaatctgcagtaactgaagaaaaagataaagaacttgttctagctgtagttggcattatatggaaagttctttcgtcttcagagataacatttcctacttgtccattttgaccaaattttcagagataaaacttagtaaatgcaggtgttgctcttctagtacgacctgatggtgttggattttcagctcattctacagatttaattacataagtttcatctttagttaaattagataattcaagtttagcatttgaattttgaattcctacttcttgtgattcttctgtactacctgtagcactttttttctcgtaagtgatttttaattttttaccttcaaaagttctttgatcattcttaaagtttttaagaggatcttttattgaaatataaattgtacgagctgtttctccattgtttacaactttaatttgtgttactactggttttgtaactaataatctttgatcatcacttacagaattagcaaagaaaatatttttaagttttggatgattttgtgcttcttgttctgaagaaatatctttaatttttacaattttataaattgttgctggatctaaatcttgtaatgaatgatcatcaattactgtatttccactagaatctgttactgttgcttcaacaactttttcttgtccatctttaacatttgcttttaaagtaatttttaattttctaccaattaagaatctgtctgtatctttgaaatttaatttaatagttgcactatttttttctgaattagttacaaattcagtgcttgtatgaatagaagtaatttcagtagttcaaggatttaaatattgttcttttttagaagtatctaatttactaaatcctgctaattcagtaaatgttttagcttgtgaatcgtcagagatttctattttttcaatttcgtaatttttggctttagttaaattccctaaactaattgaaaaattagaattttgcactgcaaccatatctgaaactaatgtttgagactgtggttgttgctggtctttatctttataagtaatttttgcttttctgttatttaaagaaccagaattatcgtgtaatttgaaattaattctaaatgcagattctgttggttgctctcagttaattgtatcgatggttggtgttggtacaaagaaacgtttttctaaactagcttctgaatctactttagtagaaaagacaatgttaaagtctttatttttacctaaaattggtttttgattattttcttctaattcaacttttaaaacttgatatttatcaccagattttaattgttgtaaactaaattcaactgtttttttatcatctgaaattgttgctatttctacaggaactgaaatagtttctgttttatttgcaacatctgagatatttctataacttatttttactttttgaccttcaataaatttggaatctttatcaaaagttagttttacttttatttggtctgcttgtgtatctaaaaattcaattttttcaacaacagcttttgaagcactaattctaaatgttgagttttgtttaatttcattttcttgttcttttattgtaggttgtaaaatttggctaaagttaggattgctttgttgtgcatttactgcttggtcatctacttcaattttttctatttcgtactgatctgttttagataaattatcaaaacggaatgtataaaatggaagatttgtattaatgatttgttcattggttagtttttgattgttttgatttttaattgtaacttttattttcttaccaataatatcttgtcaagtatcattaaatcttaaaactattttggcacttgcttcttttttagtatctacttcaactgattttaaagttgctcttgtttttagagttttatgctcgttgtcgatttggttagtatagaaaacaatcggctcaacatcgttttgagctttttcaaatgaaactatattataaacacttccatcatctaggtttttaagctcaaaacttgcatctttattagttacatttaaagttgattcttgagttaataaatctgataatgaacctaattttctatatttaacaacgattttttgattatttaagtaagaatctagatcatttagtgttagtttaaatttagctgtgttttttgtagattgttctatctcaattttgtcaatattagcagtttttggcactgttgagaaaaattgagatttttgtttttctggatcagttgatgttaatgtttttttaaatggaacatatatttttttctgtgaatctgctaaagtagaaggttgaagcacatttggattatctactatttcaagaccttgattttcaattagttggtattttccttttttaactaaatctgtaaggttaaatacaactctattattaataattggagctgatattgaatgtttttcttctttgtctttatcttgtaattgcacacctgtttgttctactaatttatagtttaaaacagcgtatttgtctctgtattcacctagtgcatctgctaactgaataacaacaccaattgttctttcgatgtcgtttttataggtaatttctaaaattcctgatgaggtaaagaaggatttatcgcttgttttgatgtttttatcaaataagatttgagtaagtaaagctgagtcttttgcactattttgttcagctgctgaaagatcagattttaacttaatgttattaataatgtattttgtacctagttctaaaggtttattttcgtattggcttactttaaattcaatttttggatcgtcatttccatttgtaggtttaagttgtgcttctacttcttcaattttgcttgaacctaatttgttaaattgaagtaatactgtttttccttgtaaaatatcagtagcatttttagataatgtaattgtaattgttgaattatcttgatcacgagcggtattttcaattttagtaacattaattgtttctgctacagttgagaagaattttttggtttcatcaagtgctgcagatacttctaaaatattattgctatttttagaacttgtatagttttcaagaacttcaattttggttatgtgataaatttttgcaccagttaaaccactaatttctaagttattaattccgttttggaaaattgtagtttcaatagatttttcttctgaattatttgctgatgaaggatttgctccggtatataacttataaaatacttttgctttaatttttttgtttttatcctttgtaaagaaggaattttttgtatctgctggaaaagcattattaaatacaatgtttaagttagctgaagttttattaggtgtgaaagtaatatcagagataactggtagtgtataaaatagtaaagaagaaccgtctaataaaggattaaaagttgtatctaagttgtttaaaactagatttttttgtgtaaggttggattttggaactaattttaatccttttactataaaagcatttccactttgtaaatttttaagttcaaaatcaattgtaaatttaccatctgcttgtttagtaaaagtttgataagtgtctgaaaaaagaagattagtttcgtcttttttatcttgagctgcaactactgcgtattgtaattgagctgtgtagtattctaaaaatttctcatcagcattaaattctaatgttgattttatagaagtttctgtattatctgaaaaagtaattttttgaatctcagctgattttacattagtagcaaaagttttttgtttttcatcaaaacgtgaagaaaaatcaagaacttgtgattgactttcttgtgtttttggatcttttttaaagtctaaaacttcgattctttcaattaaatatttttgtagttttttaagtccttttggttcaactcttaaaatagaacctactatttgcccttcaacttcaagttgtggttgtccttcgactgttccatcttcttttatttctttaaagtaaacttttgcaattttattatttaatgattcttgtttgtctatgaaggtaattcttaagtttgctgatgtttcagcttcttcatttctaatttcagaaataacagcttgtgtataaaaattaaaagttttatgattatctaatctaatatttacttctttattatcatcagtaaatattctggaaatagcaaacttacctccttctggtaagtcagtaatatgtatgtttttaatttcgtaaatttctttttgattttcaaatcttttttctattttttgcccaggtatcgctctaaaagtatatgcaccactttcttctcttcagtagtattctacatttacttgtttagtatctactgtataatcaactgtttcaaatgataaggaaatatctgcagtgtttgaagtcattgcagtttgttgaatatcacttagtgtcgcaaatggagcagaggttgaaaataatctagaagctttatttgaaaaatcaattttctctcaatttgatgggatattttctagttcaggatctttaaaataaacacctaaaatttcataatctgaagctctttttaaattatctaaataaaattctacaaattgtttattctttttttgtctacagttgttagaacttttgtaaatgtttctaatttagtagcttcatcaacttttagtttatattcaattttaatctctttgtcttttaagatgtcttgttgatcagaaaaatctagtctaactgttgaagatgaaagatgtgtggaaaataaagaaaaattaacttctggttttgtaagtacatagttagcattttttgtgaagacaaaatttgctatttctgttttcttatcacttaaatttaataatcttatggtgtataagtttcctgcatctaagttgtttgtttgaacactaaatttttgtttatcttctaatcacttaactgctttttgttctctaataacattgtcagaatctagaaaaaccataacaaaagagtctttgttattttttttcagtctagaaattaaacctggttgattggatttaagatcaaaattaaattcagcagaatgtcttgaaatattaaaactttcaaagttttctactttaacttctgaacctgttgcgattttgaataaaaatggaagtgtagcaactgaagcacctaaaagaatacctgttgctgctattgttgtttttaattttttagttgaattttttatgacagttttgtttgacatattaccttctttaaatgtgataaaatctgtaaattcatagcataaataggagtagctataatttatatattttagtttctaaattttaccacaattcaactataaaataaaaacatcacaaaaaaaaaaaaaaaaaagacttatacacaaaaactcttcaaaaacaaagtcttaaaaattttctcttaaaagaattgtttatttgcaaattcactaagaaagaagctttttttgcttgtttgtttgtttatttttgtcgaaagtttataattaaaaaattatgataactttaaaatttattcttgcaaatgtagaactagtaaaaacaaaattagcacaaagaaattttgatattaaagtaattgatgaaattgttgcctttggaacacaaaaaaatgaacttttagttgaacttaatgaactaaaagccagaagaaatgaaatatctgatcaaattggaaaattagcaagggaaaagaaggaaactcgttctttaaaagaagaagttataaagataaatgaagacatcagtggtattgaaactgactttaatgaaatcgattttaaagtagaaaatatgctacttagaatccctaatttacctttagatgatgttcctgttggaaaagacgaaaacgataatgttatcctagaaacctgagctgaagttgaacaaaaatccttcaaaatccttcctcattatgagattgctaccgaattagatatcatcgatttcaaaagagcagtaaagctttctggtactcggtttgtaatctataaaaatgaaggcgctagattagttagagctttaatgaactttatgttagatactcatatttcaaacggttataaagaaattcttccaaatactttgattttagaagaagctttgtatggaaccgcacaacttcctaaatttgctgaagatctttataaagtaaatgattctaatttatgattgatttctactgcggaaattccaattactaatttttactctcaagaaataataaatttagataaacctatcaaatttgttggttattcaaaatcctatcgttctgaagctggtagcggaggaagagatactaaaggaatcatcagaatgcatgagtttcataaagtagaactggttaaaattacttcacaaaaagaagcactttctgagtttgaaaaaacagttgatgatgctgctaatattttaaaattgcttaaaattcctcacagaagagtggttctatctaccggagatatgggatttgcttctaaaaaaactattgatttagaagcttgaatgccttcagaacaaagatacagagaggtttcttctatttcaatttgtggtgattttcaagctcaaagaatgaaacttcgttataaagaagatggaaaaactctatatgctaacacaattaatggttctgggcttgcaattgatagaataattgctataattttagaacaatatcaaacagaagaaggctttattgaaattcctgaagtattaattccatactttggtaaaattcaaaaaattagtaaagaaaataaataaaaagaaggaaaatgaaggtaaaaatgttcaaaaaatacaaaaaatatgatgataaaattaattctgaattaaataattttcaagaaattgctgactttgaagcaaacacttcagatttaattgttgtaaattacatagaaaaacaaagaaaatctgctagaaacttttttatttttgcagttattataattttattagttattgctgcttttatagctttttctgtttatatgttcggttaataaagtagaaccaaaaaatataaattaatttataaaaaatgttttactgattaaaacactttttatttggactcaaaatgactaaaattgttttaaaatattttttaaaagaaaaaaaactttttgctttaagtttattatgttttatttttatgaatttaatagttattgctaatacttatattattagcttaatttttaatgttataaaaaataatcaatttgaagaatacaaaactattttaatttgacaagtagttttctttgttttaacgaccatttttgttatttttaatatttgactctataacaaaatgttgatgaaggtaaaacaacatttaagaacagatattattaaaagtgctgaaaagacaagtatttctgatttttacaaaaaaggtcgtggttcgtttgtagcttcgttaaagcaagattttgatactatttttgaaggtttattgaataatttttaccaatttattttttctattttagccgttggagtcatactagtaattttgtttactcaaagtgtttatattactttgataacaattgcaatgtttattcctaatgttatatttccttttgttgttaaaaaagttattaatagtaaaactaaaaaaattattgaattttgaaaagtttttggtgaacaatttttaaattttctcgaaggttttccttcaattttctttttaaataaaaaatatttgcttacacaagtaattcaaaataaaaacaatattatcagaagacatataataaaagaagtaagatgaataatactatttgaaattttaaatttttctttctcaggttttattagtatttgtattttgactgttgttgcatattttgtttatcaacaaaaagaagattattctatctttatttttgtttatttctttgaaatcttgttagtacaacagcttgctcaatttttaaactacattaagcaatttgttgctacacaagatatactaaaaaaatatagcttggaagaaaaggaaaatgaagaaaaaagaagcactttagaaatacattttgaatctattgaaattaaaaatctaaatttttcttttgataaaaaagtaatttttaaagactttaatttcaaatttgaaaaagggaaaaaatatgcaatcactggtccttcaggagctggaaaatcaacattaatttctatattattaagacaaattcctttagatgaaactcagggttctattttattaaatggtaaaaattatcaagacattgattttgatacttttaaaaacagtatgacttttctagattctaaagaatttgtttttaacaccagtatctataataatgttagtttttgagaagaaaatcaagaagatagagtagaaaaggctttggaaaaggctaattattttgttgatgatatttgacaagaactaaataacttagattctaatttatcaactgggcaaaagcaaagaattaacattgctcggcacttttacagagacaaaaaattactaattttagatgaggcacttgctaatttagacaaggaaaatgcttcaaaaataaaggaagatttgtttaatgacaaggaacttactttaattcacattagccatcatatagaacctagtgataaatatgattacataattaagataggattagaagatgaaaatactttggaaaaaatataaatttttatgaatttgtcaagtaattgttcttctgttagtgtctgttggaactattatgttaaattattactatgcacagatggttcagcaaattcagagcgatgcgaaaaataacacttttaatactggttgatctaaatttttagtaatttttattactcttttaggtattcaactttatacagttgtaatttcatttataaaaggctatatacaaaacaggataaggtttaggatttattcttcagtttcctatgaagtagctcagcattttgaaaaagctaaatcaactgaaattaaaaaattttctgaaagtaaattttgaaattatttatttaatgatgctgatatttactttaatgaaaatattttaaactgaatttcttttcttaataaaatttttgatattgttattagcataataatcgctgcactaatccattgaagtttaatcgttgcttttctaggtgttctggcagtgagttttctcctttctttttcttttcaaaagaagcagaaagaagcaattattaatttttcaactgctcaagaaaaattaattgaaaaattagcaaatatattagaaggttatgatcgtttatattatgctaataaaacttatgttattaaagagcgaatgcaagaacaattccaaaatatgtatttaagcgaactgaaaaaaaattatttagaacagtttgtaaaagatggctttatcactcaagttttatatgtaataaaattaattgctacaacatccattatttttgctattttttatacaaaattagatgtaaaatcactaatattctttcgatttttatttgatgtttttcttgatagcgttcctattatgtcgatgaatttaagaaaaattaaagcaagtaaggtagtaattgataaattaaagcttgaacacataaaacctgatacaaatactgagttaatttcgccaattcaaaaacttgaatttaaaaatgttaatttttcttatgataacaaaaattttattttaaaagattttaattttgttttcgaaaaaaacaaaaaatatgctttagtaggtgaatctggaaaaggaaaatcaacaattctaaagattattttaggtgtagaagataattattctggctctattttgtgaaaccaaaaagaacttaaaactattaaagaatctagtttacgagaaaatgtaagtttcttagatggtaagaattttattttcagagattctgtggataataatattgctctttgggataaaaacttagataaaaatagagtggaaaaaatgcttgattatttcaatctttcttcagaaataaaggattttcaacaatttaataaagaaaatataatgtcgttgtctgaaggtcaaaaacaaagaattacactggctagattaatgtatacacagccaaattttgtaattttagatgaagtatttgcaaaccttgacaagaaaaatgtaaataatattaaagaaaaattattgttagattctaatttaactatcattctagttagccaccatttagaaccaaatgattataaatattttgatgcaattattgattttaataaattataaaagctttaaatatgaagaaaaatatcaaaaaaacaccaattttaatttggggtttttttgatattcttattcttgctcaattccgttaatttctttaggtcttgataatgtaactgaacctgtatctgtaactaaaacgacatcttcgtttctagctcctccaaatcctggaatatagattcctggttctacagtaataagcattcctggttctagtactgtggagcccatagaagaaactgttggaagttcatgaacatctattcctactccgtgtcctgttgaatgtacaaagtattgtccataaccttgtgattcaatgtagtctctacatactttgtctacttcggaagctgtaatgcctggtctaactgcttgtctacctaattgagctgcttttaatacaatgtttaaaatttcttcttttttaggatcaacattttcttcttttttgaagataattgttctagttatatctgctatataacctttatagcttgctccaaaatcaatttttaaaaaatcattttctttaataattacattttttggatgatagtgaggcatagcagcatttgcaccagttgcaataatagaatcaaaggattctttatctgcaccatattttttcaagaaaaaatttaacttaatatctaatgtcttttcagtgtcattttcattaatatgttttaataattcatcatatgcttttaatgaaatgtctactgcttttttgattttgcaaatttcacttttagttttaagaattcttaatttttgtgcatttatttgaacaaattctgcattttcaaatcaatttttaattctgttaaattcagacagagttaaatattcttcttcaagaccaattcttaaatagtttttggaacttacaaactcctttatatttgaagttgttaatagatggactacaacatttttagcatctttttcagcagcctcaatgtatcttgagtctacaaataaatgtgttgtatctttttcaataaaaactattccatcactagtttgaatacttgaaactcatagtcttgtttgttgagaaaatgaaattattacatctaaattgtgttcttggaaagttaaatctaaatattttttgttcattttatactattttttttctttatgactagtatgtgcattgcatttgtggcaatgttttttcatttctaacttttcagtttgagtttttttgtttttctttgtaatgtaattttccattttacattgttcacatcttaaagtgataccttctcttgccataatagctcctatacataaattttataaattaattaaacatagttatagtttaatagtgtattaaattatattatattttagtgtttataaaaataaaaaacacacataaatgtgtgctttaatttgcaaatttggtgctctcgacgagacttgaactcgtacgcatttctgcattagaacctcaatctaacgtgtataccaatttcaccacgagagcttctggcggaacagacaggatttgaacctgcgcgggctttgacacccctaacacgtttccaacgtgtcctcttcggccacttgagtactgttccttatctatataattttattatatttttgaaatattttaaaatttttactaattcttttatttaaaaaaatactaaactttttcttttgtttttcctaatttttttcgctaagtcctttattttgaaaacaaataataaaaaaagactattagaataaatagtctcttttgtatgttttagatagtttatggtttttatatcagctataagtacctcacaagatataacctaatagaattactgaaaaataactaaaaattagaatgattgaatctttactaaattcttctcctgctattcatggaaagaaagaaaaaagaagaacaaaaggaattattaataaagcaataatatagactattacttctcataatggtattttttctgcattttttcattttcaaactagtactgtaaaaatagtgaatcaatactgaattaaataagcagaattaccactatttagtatggaattaaaagaattttgaacctttaatgcctttggaataatagtaaaaataatagttgataaaattgaaattactgctactgtgtaaatagcatttctatattcaccatttttattttttttagctaaaaatgttggaatataaccatcttctgctaatggagctatcaatcttccataataaagacttgaagaaagagtggctgaaaatctattaaagaaaattcctatagaaaataaaatacttccggttgttcctcaaacgattttataaaccaaatctagtccaaaattttcttttccatctgctatcaaaacacttttgctaagacctaaaaatattaaataaaaaataaaataagcactaaaaataattataaataaaactactaaaagcttcttaaatcgattagttttgacctcttttgaaattcctgctaaaccttcaaaacctccataagcatagataaaattaagtacggttttagctaaaataactatagaaaaaggtttagaaacatctgaaatattttcaataaaactgttttttgaacttgcaattaaataaacaatcaaaccaaatccaactgctaatgttagtcattttatagcagctgaagcaaaaatgaatctagctgataatctaacaccaaaagtagaaatactaattaacaaaatgtataaaactacagaaataatcgtataaagaacttctctttctggatctaaagaggttaaaagtatagaaaaaaacagaggaactgttgaagcaaataaaggaatttgcacaaactggtttcagccctgaaaaaaactcattgatcttccaaatgtctttttagaataagcatatgaagaacctactaagtctttgtatttattagcagctcgtgaaaaagataataaaacagccaacgtaattaaagaagtaagtgcaaaaacaaacattcctcaagagcctgttaaaataacaccagaaattgttgctataaaaccaaaacctacaatatagttaagtccgaagaacaaaaactgtctttcactaagatggtttttgttgctattttctttatttttgaagaattttttaaacatattattcatcttctagtaatttaatattatattcttttagttgttcttcttcaataattgtaggcgattttaaaagtagatcttgaccttttgaattaactgggaaagcaatgacatctctaatagattctgaatgagttaagagcataatgatacgatcaagtccaaaagcaattccaccatgaggaggcacaccatagctaaaagcttttaataagaagccaaattggttgtttgcttgttcttttgtaagtccaattgtttcaaaaatttgttcttgaatttctttcgaactaatacgaattgaccctcctgcaatttcaaccccgtttaaaactaagtcgtaagcttgtgctcttacttttaatggatctgtttttaataaatctaaagtttcaaaagttggcattgtaaaaggatggtgagctgctgaaagtttacctgtttcttcatctttttcaaacataggtcaatttacaactcataaaaatttgtaatcatcttttttaactaaattataatgttgagctaatttgtttcttaaagcacctaaaccttgacaaactttttcatattcatcatttactataaacaatgtccctgttttaaaattattttcttgtacatatttttcaattgcttcatatgaatttaatttaaaagaataatgaatgattttagaatctttaatgtgaacatataacaaacgatttgctttattttgaacaacgttttcactaaagattttgtattcttttttatcaattaaaacttcttctaaaaacaaggattttgtagtatttttttcaaataaaaattcttttgaatcatttaaaacatttgcatctaataaaaaattatcaaaacgtaaatcaggcttatcagaaccaaatttatctattgctgtatcaaaatctaaaatttcaaatggtgttgtaatgtttaagtttaatttattaaaaatgtatttaactaaatcttcaactacttttcttattgattcaatagtaggaaaagctatttctacatctagctgaacaaactcatattgtctatcttttcttaagtcttcatctctaaatactcttgctatttgaaagtatttttcaaaaccagaaaccattaataattgcttatacaactgaggtgattgaggaagagaaaagaagtgattttttcttctagatggaactaaaaagcttcttgctccctcaggggttgatttggataaaataggtgtttctatttcagtaaaattattttcaaagaaaaaagaacgaatatggtaaaacaacttatttctgaaaattatgttatctcttacgggttttcttctaagatctaaaaatctgtactcgagtcttaagtcttcatttgcatctatttcgtcttgaatttgaaaaggaagttctgaagctatcgaaaatactttaatatcttcaacaataatttctaaatcaccgtttttaatatttggattaatatcttttcttttaagtagcaaacctttgatttctactacagattcctttgttaatgaagaaaaaatagtttttaaatgggtgttgtttaaatcaataactacttgtaaaatgccaaaataatctctgatttctacaaaagatttatctttgaattttctgatgttttgaattcaaccttttattgcaactttttgttctactaaatgagataaaataatttcgtttgtaattgttttatacatagttgttccttagttaaatttttcttgaagtatttttaaaatgtctggaaaatgaaggatttcttcgctaatttcaatgttttgtgatgtttttgtgtcttttatagtccacatattactgttttgatttttttctttaaaaatcaagtattttgccttcattttagaagcacttttaaatgctttagcaaaagagttaaaaagttttttattaaaatctactcggaaattgttatttcttaaatttgaagctaatttaattacatcagcaaattctgcttcgtttaaagataaaatgtaaaaatctaggaaaaagtctttaaaaagtttagtattattaactaaaatttcagcaattctatctactcccatagcaaaacctaatcctgaaatgtctggacctgaaaaacgactaaataagccgttgtaacaacctccagctataattgtcgattttgttcctaaatattgtgattccgaaataaattcaaaaactaaattatcataataatctaatcctcttactagtaaatcatctacttcgaaattaatgttattttgctttaaaagtttttggatttgttcaaattcagattgttgttcttgagtataaaagtcttttaatttgggagcatttttaataaagtctttatctgaatctaatttttcatccaagattcttaaagggttgatttctaatctagtttgcgaaatagggcttaactgatctttaaaaggtaatagatagttttttagtttatgggaatacaaatttctttgttcaactgtggctaaatagttaatttttaaagtagtatcttgagataaatcaagtcttttaagtaactgatttgcaaagtctagaacctctaattttattaagttattatcaacatttatatgttcaattcctgcttgaaaaaattgacgatatcttcctttttgtggtctttcataacggaacataggaccaaagtaaaaaaacttattattttctagataaagcttgttttcgtttatagccctaatcactggagcagttccctcaggacgaagtgcaaataaacggtcgtttttgtctttaaattcatacatttgcttatttactatatctgaagattgacctgatgataaaaagatatttgcaaactcaaaaattggggtttcaatatattcaaaattgaagttatttgctacttgaaaaaaagtgtctctaataaataaaaaaacttcttttttctttccaaaaatatcttgagtaccttttggcttatagttaatatttaatgtatcagtttttttattttctttagtaatatcactcataaatcacctagctattttgaataatcattgatgttagcgaaagtttgttcactaattttttgaacttttcagtatccaacatcaattctttttgcttttttcttgtttctttttgtttctaattttactcaaatagtagtagctataaataatgaagaaaatgttccaaaaattactcctacaaacatagcaaaactaaagagaatatcaatagaattgtagaaaatcattaagacaaatatagcaaaaattgttgataatgaagtaagaagtgaacgtttgattgtttcttttatagcttgtgtagctattcttttaactcttgattcatcactaacttctgtatatggtaattctctaaaaatttcttttattttatcaaatataacaattgtgtcattaattgagtaaccaattatcgataatagagcgactactattgttggagatagttgaacgtggaaaataataaatgtaaagataaccattaaaacattgaataacaacgaaacaataattgctagtgaaaaggttcatttaaatctaataaacgcaaatgctgttacaaaagcaattgctacaacaactgataaaattgcattcaaaatcaagcttcttgcttcttctgttgatattgaatatgttgtaaatttaaggtttgaaaactggttagctaagtttgtatttaaattttgaattacagaagttaaatcctgttgtgtttttatttctatattaaaaacggaattttcagcatttaaaggatgcattaaaatttgtgaagcattatttttaattccttgttgttctaaaaatttaataattgcttcacctttttgtttatctattaaatcataggttggatcgctgttttctattagtatattggttccaccactaaattcgatagataaatttaaacctccaacaaacgactgatttatacctgcaaatatagcaaaaattaaaattgctaaaataaacattcctaaaggaattcatctagtgtatttatttcaagctaaataatctggtttatctaaaactgaagtatacccacgctcatatttttgtaaatattttgatctaacacctaataaatattttcgtttgtcaaaaaatcctgttcttaaaacaagtgatgtcattaattttgtaaacaacataatcactaataaagtaaatataattgaaaaaattaatgtaattgaaaaactttttatgcttttagttccaaaaaagaagagaattagtcctgctattaatgttgtaatattagaatctaaaattgtacttaatgaagacttattggcatatgcattagacttattaaccgtgtgtcccgagtatattttagtttttagaatctcgaaactaataatattagcatcaacattcattccaattcctataactaaagctgcaatagtaattggtgaatattctcctcgaactatagtgaaaaatagcaaggttaagaagatatataaagcaagtgagatagtagaaagaacacctaaaagtccataatttactatcataaataaagcaattactgaaattgcaacaacaactgcaattcaagctgaagtaaaggctgaatctgatttagtttgagaaacaaatgaagcagaaagaaaatctaatttataatccgctgttccgaaattaatatttaaagctaattgttttgcttctgctgaagaaaagtttccattaataacaaaagaggaaccattaagcgcctgttgaacacgagcatctgaaattaaatatttttttgcatcaaattgatattgttttaaaacaggtgttgctggtcgattattttgtaatggagctgggtttggattttcattaacatgaacaaaattaaagacattttctttggcattttttcattcatcaggatattgagtcttagctaatttaattaaacctgaaatatttgatcaaattaaaattctgttttttccaaaaggttttttagaaacataatcagttgcttttgatcattcaagttcagcatctgtattttttaattcaatttgtacttcattttgtgaaggattatttggatttggtcttgcttgagcagattctggtttaaatggaggtgctcaatttacttcatttccatagtctaatgaaccattatctacaaatttaccatcataaaatagtggtttattatctgcatcagtgatggtcaataaaggttttgtaactatttcagaaatgaaggactctagttttctattatcagtaatattatttctagaaattcttattctaccttcaccttcgatagacacactggttccgtttagtccagaaccacctgttagtcttgtaaaaatttcttgatctgcgttttttactgtgtttttgttaggaactttgtcatccaatgttttaacttgaactaaaacttctgctccaccaccgtattcaatagatttatttatattttttgaaatatattgttggctggtgtatgaaattacaaaaacaatagtaaaaaaagataaaaaggcaataaatcacctttttcaattatttagagtgaaaagttttttaaaaaagtttttcatatcaatgtctttgctaatgtaataaacgtttttaaattatactaaaaatgaacgatattaataagtaatttaacatttcaatttttaaattgctttaaaaataaagcaaattgaaccaaaataatgttgtataattttcaaatatttttcaaaggagcttaaaatatgaaattaaaaattggaaaagaaagacttttctttttgataattgcgatttgaattttattatcaacatttgttgcatttgttgttgatattgtctatactaaatcccaaaatgaatatataagtccaaatggtatttcttttgaatacttttttgggcattttagtccttttattttcttcacatatcagtctaattttatgttagcggtaggttgttttttaatatattttaaatttagccaaaaacatcaaagactttattttgcttttgtttctttaattactattacttttttagtttactgggctttaatttcttgaaaatcaaatacttgaaaaaatccgggaacagcaattaaatctttaactactcacttgataaatccttctttaggatttgttggtttgttttttattagaagatcattagtagttgatcacagattgttttttaaagctgggctttatgtccttggttattttgtttttgctttattattgtacttttttacttatggaaattatgaagcaatcaacaaagaagggcaaaaatacagtgtgcatgatggtggaactatttattcctttttaaacttcactaaacctttattttataaagaaaaaagtgtgttaatcgttgtgtttttagatatattaattctgtttgtggctatattaattccttttggttgttcttatttttgaaaatgagcttttaaaatacgacttgaaaaaaaacctttatttaagaaggaaaaacaataaaaaatgtagcaaatttgctacattttttattgtttttttggcttggattttatttgtttatatcattttttaagcattggtaaacctatttctattcccataacaagtaccattccaataggtcctgcaattataaaaatatcagcaaaattaaatgttccattatcacgataaggaataaaaattatatcctttactccattttcatataaaagtctatctaattcatttcctatgttgccagctagtagaactatcataaaggctgcgaaataataatttttagacagtaaaacactaaaaattaagataaacaacaataaaaaggcaaaaatatgaataaccgtaaaaccgaatttttttgctaaaccggaagttactccttgatgtaaaagaggtctaaatccaattcaaccgtgattaattcataaagattctggtggagctgatgttttaaaatcttcgtgtttaaaaattaagttttttgttaattgatctattaatagcaaaacaagcaaaagaccacaaagaaaaagagcattgagtaaaagtctttttttagaaactcttttaagaatacaaataactatagttttaacatctttacctttaattgtcatcgagtaattccttaacgacttcataacatcttagacacacttcatttttcatttcttttttaacaaagtggtttcagcaacgtaaacattttgttgattcaaaagcttgaactttatctttgttagcaaaatgtacttttcctaccattaataagtttttaagatctagtgattttataaattcagaatctgtgtttatatggataaaagcttcgttagttctctttatcagaccttctttaatttgttgttcaattagttgataaattctatctttaaccttaaaaaattccttccaattttcctcaattttttcatcaaatgcttcttttttgaagaaagtttcgagatgtactgattcttgtttattatctaattttaaaaatgagtaaatctcttcagtagtagttggtaaaattggagccagagaaattgttaatacatttaaaaggttatataaattaaattgaaactgtctacgatttaaattatctagcttgtcggcatataaagagtctttagctatagataaataaaagtttgaaaaatcaataatgaagttattaatttctttaataattttgacaaatctaaaattatcatagttgtcaattattgtattttttagtttcttaattttgttatccatatactcgtgaactgattctagtttaagttcaggattatgtttgtaatcttctaaattggtaattaaaaatctaactgtatttctaatttttctataaatttctacattttgttcaatgatttctttagaataaactacatcattaaagtattcactattacttgctcaaagacgtaaaatatcagctccataagtttttattaagtctagaggattaacaccatttcctttagatttggacattttattacctttataatcaacaacaaaaccatgtgataataatcttttataaggtggatgttggtaataaataaaactgttaataagtgaagaattaaatcaaccacggtactgatcagaaccttcgaaatacaagtcaaaaggaacttttacgttatcaatttgaacaccaatagaagtagaacctgaatcaaatcaaacatccataatgtcattttctttgcttcatccaagatttctaaattgttcaggtaaaagttcgtctacttctctttcatatcaaacgtctgaaccaaattcttttactaaattaattacataatcaaaaatttcaggcttatctaaaacaggatttttatccttgtcataaaaaattataattggaacacctcaagatctttgtcttgaaattgttcaatcttgcctgttttcaatcattgcttgaagtctgtttttaattcattcttgtggaaaaattacttcttcaattgattttaatatatcttcttttattttttcaattgcaacaaatcactgtggagttccacgataaataactggtttgtttgttcttcaatcatgaggatatgagtgattaaaagtagaaaattttaataattttccttcattttctaaagcaagtccaatttctttatttgcgtctaagtaaaataaaccttcatattttccagctaaattatttaatgtaccatcatcattaacatgcataatgtgttctaaaccagtttttttagaaattcaaaaatcatcttcaccaaataaaggagccatatgaactaaaccagaacctgaatctattgtaacatgatgtccgataacaatttttccttctttttccttcataattggtctaatatattcaacatctactaattcagttcctaaaaaagtatctaaaatttcataactttctcagttaaactcttttgctaatttttctactaattcagtagcaataatgaagatattttctttatttttaactttggaatattcaaaatgttctccaactgctactcctgaattagcaattaaagttcaaggtgttgttgttcaaattactaaattatctcctttgtttacttttgaatttccttttgaaatttcaaaagctacataaatagaaggagaacgatgatctaaatactcaatttcggcttctgctaaagctgattgactagatggagatcaataaactggtttgagtcctctataaactaaacctttttcaaccataactttgaaaagttctaactgttttgcttcaaaacctggtgtgttagtttgataaatggtactcaaatctgatagtaaattgagttgttcaaattgttgtttttgtgcttcaatttgttcatttgcgtatttattagcttgttttcttaactctaaaactgataaagatttgtgagaaatgttgtttaatgaaagaattttgttttcaattggcaatccatgtgtatctcaacctggaacaaaaggagaataaaatccttgcattgttttatatctaataattatatctttcaaaaccttatttagagagtgtccaatatgaatatccccatttgcatatggaggaccatcgtgaattacaaattgagggtttttataattattttttagtgctttttggtaaattttattgtctaaccaaaattgtctatattttgcttctttttctgaaagatttgctttcattgaaaactctgtggtaaatatatttaaagagtttttataaaaatttttgtccataatgttccttatttatcaaattttttaagtaatgcatctatatctagctcatcaatttctttaagtttgtcttttactttttttactgcattatcaatatcaaaaggcttggaagaaactggtttagcttctttttgttctactttttcttctactttgctttctttttctttgtaatttcttgatttagaacttactttttctaactttttagcttcaattttattatatttttcttcgtttttcaaactattattgagttgatttatataaatgtaatatataaatggattttttaagtttgaaaacttgtcagaatcaatttgtaactcttgaatttcctgcctggaaatcttgttaggttcttcaaaaatgaagcaaattgcatcagttttaaattcaacaatattaacaatttctaagtgagaaaatttagattctaagtaatttttagcttgactatttttgtttccataaaaaatagaacttaaattcatttttctaatataacctgtttttgccaccaatacaaattcattatctgattgtcctaaaacaaaatgatttataaattcgccatctttaagcttcagtactctaactcctgatgaatttgttccgtaaattggaatttctatttcactgtatctagaagctctattttggtttgtaaacagtgcaatatcttgataattatcacttagttttgctcctactacttgatcatcttgctttatttttatagctaaaatagtttttttgaacctagaaacttctaaatcttttaatgaaattcttttacccaaaccatttttagtaattaaagttataaaataattttcactaaattctgatacttcgattactgaaattatgaattcatccttttttaataaataatctatttgtaaatcagaccaagttgatttaaaagttgaatcttcaatagtgtgtaagggaataaaaatgtaatttcctagtgatgtaaaaattaataatttatttttagtttggattttgtttacaaatacaaaataatcttgttcttttaaaacaatattagaaatgtcgttagattcaaaaactttgtttgacatctttttgtataaaccttgtttagtaactacaaaatatgcttcttcatttttgattagttcttcttgattaatttctattttaaaagtttgattaataatttcagtttttcttggcgttccaaatttagttttaatgtcttttaaaatagagattaaatatttgctaaaatcaccttcattttcaagtaaattatttaaattagctacttgttgaattaagttatttttttcatttaaataattttgctggtcaattctagaaagtctatacaatctcatttcggcaattgcagttgcttgtaaaatactaaaactaaagtttttgactagggcttcaattactccttgtttggaattatcagaatttctaatgattttaattacttgatctgtgatatctgcaactcttaaaaaaccttctacaatttcgagtctttgtttattcttaaacaagtcaaattgaatttcttttgttttaatgtctcttaaatgatctaaataataatctagcattttaggtatagataaaagttttggagtattattgtgaatagctactgaattatatgaataactaatttgcatctgcgttttctgaagtaaataatttaaaattaattcaatatttgcttctttttcaagctcaatcataatagaaattccttttctatctgattgatcaattacatctgaaattccttcaattttcttctcaaatctaatttcatctatttgtttaacgagttctgcttttattactgaaaacggaatttctgttatttcaattgctttgtgtttattttcatccattattttatatttggaaactaaaattacttttccttgacctgtagaaaatgcttcatcaattccttttgtatcataaataattccaccagttggaaaatctgggcctttgattatttgccttaatttagaatgtggtgttgctttgtttttgagcatctctacacatgcatcaattacttccgataaattatgaggtggaatatctgtagcaaatcctgaagcaattcctttagttccatttactaataaattaggaaataaaactggtaaaactgttggctctttttctgaatcatcaaaattaggaacaaaatttactgtttttttgttaataatttctaacattaaattagcaacagcttctaaacgtgtttcggtataacgcatagccgctgctggatcatcatcaattgaacctttatttccatgcatttctactaaagggagattcatttttcattcttgagccatacgaattaacgcttcataaattgaagaatcaccgtgtggatggtacttaccaattacatcaccgacaattctggctgattttttaaaaggtttatcatttttgagacctaacattcacattgagtataaaatccgtctttgtacaggttttaaaccatctctaacatcaggaatagctctttgttgaataacatattttgagtatctaacaaaacgttctgaaactatagaatcaagtgaatttactattaattgttcttcattttgcttcattttattatcttgtttcttcattatttaagtcctcattgtcagttaaatttataataaaatcatcgtctaaagaaaaatttacgtttttttgaattcactcttttctaatatctattttgtctcccattaaagtaaaaattcttctttctgctatagctaaatcttgaatttgtactttaattagtgttcttttttctggattcattgttgtatctcaaagttgttcagcattcatttctcccaaacctttgtatctttgaatatcaaaattagttctgttttgggtgatttgttttaactctgcttcatttcaagcatataaagattctttatttttaaagctaattttataaagagggggttgagctatataaacgtgatttttttcaattaattccttcatatacctaaaaataaaggttaaaagaaggatttgaatatgagcaccatcagtatcagcatcggtcataataataattttgttatattctaaattattaatattaaaatcttgtccaattcctgtacctaaactactaataatggctacaatttcattattttttaataagtcaattaatcttgttttttcagcattaattatctttccttttaaaggtaaaatagcttgaaacttacggtctctccctaattttgcactacctcctgccgattcgccttcgacaatgaaaagttccttttctagcttattttttgattgtgctggagccagctttccggaaagaattttcttctcttttgaagcatctttggatttcttagactcaattttggaaagcttacttgaaactctttgatcataagcatctttaattttattaagaattttattagcttcttgttggtttttgctgagtcataaaagaatttgcttataagtaatgtcttcaacaactgttttagcaatttgtgttcctaatttatctttagtttgcccaacaaattcaagtaaaaattcaggtatttttaaagataaaataagagttaatccttctttaatatccaaaatatctagtgaatttgctttatttttaaagatatttttttgttgtgcaaaatcgttgaaaactcttactagaccttgttttaaacctaattcatgagttccaccagatttagtttttatattgttaacgaaagaaattattgaatctgagtaactatcattgtactgaaatgcaagttcaacgtttattttttcttgtgtttcatcaattaaaactgcttgtttattcaaaacagttttaccttgattaataaattctacgaaatctttaattccatttttgaaaaaaaatgcttctttttggaaggtagttttgtcttcaagatgaatttttaattctgaaattaaaaagcaagtttctcttagtctttctgatattaagtcaaaagaaaaattattattaccgaagatttttttatcaggtcaaaattgaaccctagtaccttgtttgttaatatttcctactattgttgttttttgttcaatttttccaccattaataaatttagtttcataatttttattatttttataaacattaacaattaatttactacttaatgcgtttacaacggaagaaccaaccccatgaagtcctccagaatttttataaacatcatcagaaaattttcctccagcgtgaagttctgtaaacacaagctctacacctgaaagtccactagcgtgtttttcgacaggaattcctcttccatcgtcttcaacaacaatagaaccatctgtttctaaagttacattaatgttttttgcaaaacctgctagagcttcgtcaactgcattacttacaatttctcataccaagtgatgtaaaccttcaaaatctgtagaaccaatatacattcctggtctttttctaaccgcttctagtccctttaaaacttttaaattttctactgtatatgttgacataattattcctttagtttgttaatgagttaaaaaaataaaaaatttcttatttaataaatattaaatagtttatatattttaataaaaaaaaattcagttgaataaaaagaaagcaaaaaataaggaaaataaagaaaaaaaccaagatttttcttggttttttactcttgggtttgtaaagttaaattttctgtgtcttctttttgatgctcgtcgttttcttcttgaatatcgtcgttaaatacttcttctgcttcttcacttaatggaatttctaaaagtttttctttaattaattctctttgttgttcttgttctttatattttactaaatctttatggtatacataaaagcctgcaaaaaatgctgaagcaacaacaaataaaattaaaaatccaaccactataattccttcaattatgaagcttgcaaactcagtaccacctactttagcataaacataataggctaaaattcctgcgaatgcaagataagctacaattgataaaataaagaaatgaatagctgtttttttgtattttttagcatcaatatctgttaatatcattttttcctttaagtcgaaattattttaattatacaacaatttttaatatttatttaatataataataaaattagaaaatggaaaaatttaaacaactaattgagcgaaaaaaatttccaaaaacatttggagtttacaaatttttagaccaaaataaaaatgttttatatgtaggaaaagctaaaaatatttttaatagaatgaaacaatacgcaactggtcatattaattcttacaaaacaaattcgttaataaatcaaactgaagatatagacttttttattacggattcagaaaataatgccttgatcttagaagataaatgaataaaattatataatccaacttttaatattttactaaaagatgatcatacttatccttacattgaaattaacaaaaatttagacattaaattagcttataggatttctagtaaacataatttttattttggtccctttactaaaaaaactgatgcttggcacttacaaagatatttagaaagtaaaattaaatttgaaaaaggtcttcctatagaaaatctatcaattgaagaaaaacaaagtaaatttgagttgtgtaaaaagattttaaaaatgaaaaatgcttcttttttgaagcaaatttatgaagaagaaaaattttacgtagagcaagagcagtatgaaagagccagtgaactaaaaaaagttaggctcgcattatctgatttacaaaaccaaaacaataatatttctttaacagatcaaaaagacattgattttatttatgcagaagaaaatagctcttttgtttttatttcgtttcttttttatagaaatggaactttattttcgtataagaatttgagtttaaatttaatttttaacctggaagaaacttttgctatatttttaaaaaattactataaaactaatttaattcctgaccaaattgtcttagaatctacatgagccaactgggacttaatcaatgaatttaaaaatttaaatatagttttttctaataacaaaaaattcaatcaagtaatgcaaatggcaaaagaaaataataaattttttgttcaagaaaaattaaacatccttgaaaaagaagaacaaaaagagaatttaatccttaaaaaagtagcaaatgatctaaatattgcaaaagcaaataaaataatgattatcgataattctcactctaattttgaaaatgtagttactggaattatcttttttattgatggtattcatataaacaaatttaataggttttttaatgtttctaaatctttaaaatcagatttagattttatgtatgaaagtatcaaaaaatacttttcaattaaaacttttctaaaaccagatgttatttttgtagatggtgcacaacaacaaataaaaaaagcacaacaagctttgagagaatcaaacatttatgtacctttgtttggtattgttaaaaatgcacaacataaaactagttatgtcttgaatgaaaaatgtcaaaaagttgaaaatattagtcaagaatccttcaatttcctttctaatatgcaaatccaagtagataaatatgcaaagataaagcacagaaaaagaaacataaaaattttaacttcttcttttttagataaattaaatattgatataaacactcaagagaaacttttagcttactttaaaacttatcaaaatattaaagaagctaatgaagaagaattaaaattatttttaaattctgaacagatcaaaaaactcaaaaataattaatgaaagaaaacaactaggatttaattttttgttgtttaattcatatagtttatatgctaaagctatgtattcgcataaacctttgttatttcctaaatccgtataactaatttattcttcagtgattaacgatttgaaccactaagaatgtggaacttcataatacactgatactattgatgagtctttactgtaattatctaaatttattgtgaaataatgtttttgaaatttaaagatatgtaaaagaactttatgttaaaaaatacctattttaatgaaactcgataattgtataatttaaattattttgttttataaatatgcattttttactttacaaaaatataaatatagaagaaaagtaaagaaaataaaataccacaaatacattgtggtattttataatctatacttatttttaattttttaatagcttgttttattcttaatatgaatatttgttttttaatttttctatatattctttttcttctttaataaatggaataaatattaaattagttactaacataacaactgctcaatatattataactattccaaaacaggtaacaatttgtttaagatatattttttcatcaaaaatagaagtcgaaaatatgtaaaagagaaacactaaaaaggctaatatttttgaaaaaaataagattctaaactgaaattttttaaaatctcatctttgttcgataacatcaaatttattgttatgttttaatccaaaaattaatggaaatagaataaataatactctattttttacagttgaaatatatttaagtgaaaagaatatttgatatattaaagaaaaaaaagtaattagaccaaatccaggaagaagaattaatgatataaataaaccatttcaaccctctccttgtgggattaagcctatagaaatgaagaaaaaaaccaataaatgaattataaaaaatcatctaaaaaatgaaataaataaaaaagttattaatttgaatttatttggttgcaatttacctcctgtaattattttactaccaatttactaccaaacaaataaactaaaaaattgtttttttaaagttttacaataaaattatgttttcctttttggttttttcaagaatttctttaggtcagtagctagattgaacttctccaatgtgtgctttttctaataaaaacatacataatctactttgacctataccaccaccaatagaaaatggtaggttttcatttactagatcattatgaaattttgatttcttttctaattctagtttagttaatttactttgttctaataaggcttttgcatctactcttatacccattgaagaaatttcgatagccttatctaaagtttcgtgataaaaaattaaatctccatttaaatttcaatcgtcatagtcgatagctctagatgaatgtacttgtccagattttaattttcaacctactcttataacaaaaaaagctttagctttttcttttgaaaatttggtttctctttctgatggactaagttcaggatataaatcttctagttcttgtgagtctataaaaacaagctcttttggtaatttgattttaagttgtgggtatttttttactaattcttcttctgtttttcttatttgatcataaatagtttttacagtttgttttaagtaatctaaatttctgtcttcttttttaataattttttcccagtctcactggtctacatagtatgagtgaaaaggagatagtatttcttcttttctaattgcattcatatcagtgtatagacctttataaacataaaaatcgtactctcttaaagcatatctttttcatttagctagtgaatgaacaatttctaatttggtatcaagacctttaggaacaaatgaaacagctgcttctccatttaaagtgtcatttaatcctgttagaggttctacaaataaaggtgcagtggctcttgttaaagataaagcctcagataaaaatttaggaaataatattttaatgttttcaattgctttttgtgtttcaaaaatatttaattttgatttatacatattacctttctatgttagatatctaaatagaaacttttttagcaacaaaaattatttgataaactttggaataatcaaaacttataatttatgttactaaatactataagtttcaattaattaaaattatttaaattaacaaagttattattaaaaactacactattaaataagtgatttatctgattctgatttaaatttaataataaaaacttcattagtgagttaaattatactctttttttaaaattaaaaaaatacatcttataaagatgtattttggtcaaaaacgatatggtgggaacgaatgggatcgaaccatcgacctcacgattatcagtcgtgtgctctaaccatctgagctacgctcccaataatattagcaacaaggttgctaatgtatattatactataaaaattaacgttttgaaaattgtcttgaacgacgtgcagctctgagtccgaatttctttctttcttttgctcgtgcatcacgagttaacataccttttgattttaaatcaggacggtaatctgcagatgcttctaataatgctctagcaattcctaatcttatagctcctgcttgccctgataaaccaccacctgaagcatttacattaatatctcattgattggttgtttttgttatctctaatggttgtaatgcctcttgaattaaaaggtctaattttaaatattcttttgctgaacgtttattaactttaaattcacctgttcctggagtaattatgactcttgcaactgaagattttcttcttcctaatccacgataagtaatttttttatctgccataactatttacctacctttaaaatttctggtttttgtgcttcatgtttatgttctggacctgcataaacaaataaattttttctttgtttatctcccaatttggtgtgaggtaacattcctcaaactgctttttctattaaagcaattggttttttagctcttaaatttttagcatttattgtttttaatccaccaggatatcctgagtgtgaataatagattttttgctcttcttttttagctgttaaaactattttatcagcatttataataatgatattgtctcccatatccacatttggtgtgaaattagggctagttttacctcttaagtgagaagctgctaatgttgctaacctaccaagtacttgtccagcagcgtcaataacatatcactttttagtaacttctttatgttttactagtgtggtttgtctcatcacaattcctttttattttttaataatgtaaaaataatgtaacaggttaagtaagtttttaaattatacatttttatttgaaaaaccaaacaaaaaaatcgagtttttactaattaattttattttatttaaatatttaaattagtttattaatttattataataattcctaaattatgaactcaacagattttttaattaagattgaaaatttaaaatttcagtatgacaagaaacaagtttcattagacattgaaaatttagtgtttcaaaaaaataaaataattactttattaggtccttcaggttcgggaaaaacaacttttttgaacttactaataggatttttgaagccaaaagaaggaaaaattcttataaatgaagacccagaattttctaattttggttttattatgcaagataataacctttatgaagaaataagtgtctttaaaaatgtttacttaagtgcaaaaaattcttcaagatgaaagtcagaaacacgatttaatttttgaagcgaagtaaaaaataagttttttgcttcaaatttgaagcaaaaacaagttcaaaatttagataatgattttgaaaattacaagaaaaaatgtattcatatagaaaaacaccaagttttatatagtaagttattatatttacatattctttctaaattacttgttttatcctttaaaaataaaagtttatttctgtttttactcaaaaataattatttgtataaattctttaaaaagtcttttttacctatagcaaaaaaacttcaaattgaagaaataattaataaaaaagcaagtaatatcagtggtgggcaaaaacaaagagttgcatttgctaaagctataattaaaaatacaaaattaatttttatggatgaaccttttgctgcgttagatgctaaaatcaaggaatctacaattaattgacttgaaaaaattaaaaatgaatttgatttatcaataattttagtaacacatgatcaaactgacgctttaaaaattagtgatcaaattactgttatgaatcaaggaaaaattatgcaatttggcagtgctgaagaactatataataatcctacaaacctgtttgttgcaaaatttttaggctttccagaaattaattatttaaagactgaaaatgatattgatttttatgtcagatctaacaaaattttagtatctagccaagaaaaagaaggatatttaccttttaaaatacaatctaaaaagcttgttggagaatctatactatataaattaataagtataaatagtacaaaagcaactaacttagaatttttacaaaccattaattttgaagtgaattctattgtttatttaaaaataaaagatgaagatattttaaagtttgatgctttaggtcagagggtaagataaaatgaataaaaaaagtaaatattttgctaaattgtcttcattttctgaagaaacttttaaaaaaatctcttctggtattaagaaaaattggaagggttttacacttattgccccgttgttaatttttttaattgttttttctgtttatcctttatttaatgcgtttttttattccttgaaagactttgaaaaacatagtagaataaaatgacatatcggaattggtagctatcatagtttgatggcagataatagatttcacgatagtattaaaaattcaactatattattttttattgcttctcctattgctattattttaggttttgcgattgctttagttatatcctcgctaatgtcaaaactttcgagaaacatttttataactgcactttattcacaattttttatttctgcatttgctatcagtgtagcttttgttcttttatttggagacagaaatgttttaagtgtgttactaaagtgaaattatgactttgtaagcggtaataaaagaacacctttaataattttgttatgtttatttcagctttgaagagctatcccatttaatgcagtactattttgttttgcaattaataaaattaaccttaaatatagtaaaaatataaaaattgattctttgagtatggttgataaggttaaaaacttgtattttccagaaatgaaaattactatttttaacatagcttatactaactttatttttgctgctttactatatcctcaagttttaataggaagtaaagatttatctaattatcacggagacacactcgcttcttatattatttccaaaattactgtaagtgctaatccttctttagctatggctgcttcatttttctcttttgtttacttgtgttttcttcttttatctgtctttttaatgcgttgaaaatttataaagttatatattaaatgaatttctaaaggttgaaaattcattttgcatttattaaaaggaggaaaaaatgaaactattagctaataaaaacttgtatattggttataaactaatatttgaacttttgaaatactctttaattacttttgttattattttagttctttttcctatttattttttaatagtacaagcttctttaagtaatagtgaaacgttgtctacaaatgtttatttaactccaaaagatagtttgtggactaatataaaagaagtgcttgatgatttatttttaaatggttttaagaattcaatgttaagtgttttgctaataaattttttaagactttcattgtatactttagcatcatttgggctcatgaaactcagtaaattaagtaaaaaaatattttatttattcttcatttttgtttctcttacaccagaaatttcactatatatgggatataaaatcttattatacaaaagtaatatattgaataattccgtaatttttcctttaattattaatcaaattttttcatttttcttatttatgtatttatataaaatattgtcttcagtacctgaaaataaaattaaattaatgaagattgataacttaaacttacttcaaagatttttttatgtttacttaaaatatttaaaaatgccatattttttaatcattatcttttcttcaatacaagcttgaaatgattatttatgacctacttttatactaaatgcctcaaaagaacaaaccatttctacttgatttacttttgcaggaagtaaagatcaatctgctaatttttacaacctaaaagccgcggcatcattggttgctgtaattattcctttactaacttatttaatttgttctccatttgttaacaagcaaatttctaaaggtttttaaaaaattcaaatatttgtttgtaattttcaagactaatttcttgtggtctaattttatgatttaaagaaaaatgattaaatatttttttaattttttcttcatttatgaaggtagatagattattataaaatgtttttcttttcatagaaaaacatttttttgtaaaactaaaaaattcttgaatattttgttgatcaagattttttttaaattcaaaagttaccaaagcagaattaactttgggttgtggcacaaaactagatggtaggatttttagttctttttttacttctgcaactaactgacaagcaagagataacttggaaaaattacttgttttttcttttgcaacaattctatctgctacttcttcttgtaccataattaccattttcgaaaacatagaaagattctcaaaaattttaaacaaaatgtcacttgtaatgtaataaggtaaattagcaactagaatttttgactcattaaaatttaaatctgcttttaaaaagtcttcgtttttgatttctaattttgaacttgtaattttgttttttaaaatttcaattaattctgcatctatttcataagccaataaagacttagctttttctaacaaaggaattgtaatagctcccaaacctggaccaatttctagtatatcttgattttctggatttgctagttcaataattttttgaattataaaattatcttttaaaaaattttgtccatacttctttttggcttttatattattcataaagttttactttaaaaattctttctatatttttgttaatttgagaggttagtgtaagcaaactgatttgtctaattctggaaattaaattatagcttggctttatgcaataactgtgatttggtcaaagagatcttgtaggttcaggagataaataaggagcatctgtttctaataataatttatctaaatccataatttctaaaatttttctagcctctttattatttttataagtaatcactcctgaaaatgaaaaaaagacatttgaaaacttattaaattcattatatatttccaaattacctgaaaaattatgaaaaataaagttaacatctagataatttgtaattattttctttatctgtttaaacaagaaaaaatctttttcattcgcattttctcttatatgaagcataactgttttttcatattttttagcaatttctatttgtttaattagactttgaatttgtagatcaaggcttgggctttcttcataataaagatctaaaccaacttctccaattcctacaacattggaattttttagtaaaagttcttccaattgttcataattgtcttctttttgaacattatttggatgaattcctattaatgcgaataaatttttttgcttatctaaataagaaacaatttcttcattatcttttcaagaagttccaattaaaaacaatgtttttaggttatttttaatattttcttcaatttcttgtttgggttcggaataatattctaaaaatgggtgagtgtgtacatcagaaaaactataactgatttttgtatcaagtaaaactaagtatttttcgttttgcttggtaacttcttgaaaattaaagtcattttttattaaattaaaaaattttgaatctagttttaaattaattaatttttgttcgaactttaaaacttcttgaaaaaagcaatggatatattcaaaaattaaaatgcttcatttttcttcatttagtaaagaattaatttttatatttatagtaaaaaaagcttgtttttcttctttaactatatttaaataagctcctacttctttaaattcattatcttcatcaactaataaaaattctcaaaataatttgtcattagattcataaattttaaaactatcttttgttaattttgaaattgaaggaaataaattagcttcatttttgaagctaatttcgtattttgaactatattttggagtgggttttacaaattgtcaattcatatttacttcttttgagctctgaatataaatatttgtttatccatatcagaatttattttttctactttataatcaaatttaattaatgcattttttgcttctaaaatttcttcaaaaacttttggaccttttatataaataaaagaagttgttggtttttgaagcttttttgtgattttaaataaaaaatttatactacctacagctcttgcagttataaaatcaaaatttttatctaaattagaaactgaatcattgataatctcaaagtctaaatttaatttttctttaacaagttctaaaaaattacatctttttttgagtttttcaataatagttagttttatactagtattaaaaattaaaaatggaattgaggggaagcctgcgcctgctcctacatctagtaaagattgtgaatttttattattttttataattggttgaagacaaataatagattcataaattccttcttttcataattgatcttctgaaaagcctgttaaattcataactttatttttttcttcaatcaaatttacatattgttcgagttttcaaaatatttgttcgttattgactaattgccttgttttttctttaaaatcaagcattatttcttcaaatcatccttaagatgagtataaatggaagaaatagaagttgaataaacacaagctttaattgcatctgctatgaattcagataaacaagctacttctaatttagaaaacttttgttgtagttctgaattatctactgaatttgttattataactttatcaacattgggtgagttttcaaaaacttcaaaacctttagaaaataaaccatgtgttgcaactacagtaactgacttagcaccatgctcttttaacaaatcagctgctttaattattgttccaccagtatcaataatatcatcaataattattgtatcttttgcttcaatatcaccgataattccgtgagcttcgatttgattagttccaactcttcttttatcaataattgcaattttagtattttcatttaatagctcggctaacaacctagctctaacagctccaccatgatctggggaaacaattgtgtatgctttatttttttctctgatttttttagccagaatatattgtcctcttaattcatcgactgaaatgttaaagaatccttgaattgaaggattatggagatcaactgaaatgatttttgttgctcctgcagtctctaataagttggcaattaattttgctgtaattggttgtctaccagtagattttcgatcttgtcttgcatatccaaaataagataaaataacaataatatctcttgcataagctctttttaatgagtctataaaaatcaacaattccattatgttgtcatgcacaggtttatgtgtgcttgctacaacaaatacagtggaatttcttatagtttctgctgatttaagaagaacttctccatctgcaaattttgttttttcaatttgtgttaaaggtatttgtaaaatatttgatattttttgtgcaagtttttcacagtttggcattccaaataaaactacatttttcttgttttcaacaatcatttttttcctctttacttttttataacttgtttattaataattactttgtattatattacttttttaattcataatataagaaaaaatagaaaataaaaaatccactaagttaatgtggattttcaaaatatttattttgttaatgaaattataaagaaagatttttttccttttttaatcaataatttatcgaagtttttcttcaaattagaagcaatttgttcttgtgatttaataatttctccatttatttgcaaagcagaatctcgaataaactcattaagttctctttttgaagacaagatttttaattcaattaatttattagaatcaaaatcttgttcttttacttcaaaattatcaatagatttggctagaacatctaaatctttttgttcgatagattcgaaacttaaattattaaacaataaacttgaaatttttaaactttgatcaagagcatcttgcccatgaatatttaaggtaatttcttctgctacttggtgctgtaagaacttatctttcttattttggctatgtttttgaaggattttttcaatttctgtaaaaggtttaaatgataatcattttaaaactttttcagcttgaaaatctgataaattaaataaaaattggtaaagtttaaaagcagaagttagttcttgatctagtcataaagcatcaccattaaatgttgtttttccaaatttatttccattttcatcagttagtaattcggttgtaagagcaaagcaaggtgaattatttttgtcactcaaacttgtttttttaatcatatcaagaccttgaacaatatttcctcattgatcagaaccaccgagttgccctacaatattaaatttatcaaataagtatttaaagtctcaagcttgaataagttggtacgaaaactctgtaaaagaaagtccagtttttattctcgaagcaattgaatctttagttaataataaagctacattaacgttttttcctacatcacgaagaaagtctaaaacattcatatctttgtaaatttcaaaattatcaaaaacttgtaaattaaatctttctaattgtgttttaatgtaatttttatttttaataatagcttcattagaaagtaaaactctttctttagaaacaaaagcaggatctccaatcatacctgtagctcccccgagaactgctattgttttgattccggcttgttgaaaacgttgaagtaaattaataaggatgtaattacctaaatgtaaggatgtggcagttggatcaaaacctacataaacaccttcattttccttcatatttaatagcttttgttcgtcactaatttcttttaagatgcctcttaattttatttcttttaatagttgttcttttttgttcataatttcctttatttttttaaattttttggtacagaatttaaatctacatggcaataaccagtaggatttttatctaaatatttttgatgatattcttcagcaattgttaaatttttaattggtaaaaattcaattgttgtttgacgttttgcttcattttcaaaggaattattaaatttttgaaacacttttaatagttgttcttcattagaataaaacccgatacgatactgaagacctacatcatttccttgtttatttaaagaaaaaggatcaactatttttagaaataaatttcaaatttcttgctcagataaaatagaagaatcataaatgagttcaagagcttcaacatgccctgaaccagaacatacttgtttataggttgtattttctttatctccgtttagataacaaacttgagtttctaaaacaccttttactctttggaaaaaggcttctactcctcaaaaacaacctgctgctaaatatatttttttaaccattttgcttccttaattttaaaaacttaagatttttaaattattcttattttttaactaattttcttttaaaatctggctgtatttgttaattatataataataatttgttataattttaaaatattataataaaggtttttataggaaaattatgtatttcaaaaatgatgatgaagaatcaaaaataaatcaaaatgaagaaaaagaaatcaaagaaaacgattatgaagtttacgatgatgaagtaaaaactgtttttagtcaagactctgaagaagaagttgatgaagatgaagaagaattagagcaaaacaaagaaggattccaagtatcttctcaactaattgaaacagaagttgacaacattgtacctaaatacatttcagaagaggttagaacttcgtttttagagtatgcaatgtcagttattatctcacgtgctcttcctgatgttagagacggtttaaagcctgtgcatagaaggattttacactgtatgaatgaacttggaatcacacattctgtagcttataaaaaatcagccagaattgttggtgatgttttaggtaaataccacccacacggtgatgcttcagtttatgattcaatggttagaatgtctcaagattttgctcttagatatcctttaattgatggacatggaaactttggatcaattgatggtgacgaagcagctgctatgcgttatacagaagcaagaatgtctaaaattgcttcattaatggtagaagatatcaagaaaaacacagtagactttgtcccaaactatgatggaagtgagcaagaaccagaagttttacctgctagatttccaaacttattagtctctggagtatccggaatcgctgttggtatggctactaaaattcctcctcataatctaaaagaagtaattgaaacctttattttattagctcaaaatccagatatttctgttcaagaactagcaaaacatcttcctgcacctgattttccaacaggagctactattttaggtacagcgggaattagacaagcttatgaaacaggacgtggtgcttttgttcttcgttctaaagcaaaaattgaaacttttaatagtggtaaaagcaaaattattgtttatgaaattccatatgaagtcaaaaaacctcaaataattgaaaaagttgttcaactagttagagataaaaaaatccaaggtattaaagacgttcgtgatgaaactaatagaaaaggaattagagttgtttttgatatcaaaaaaggatttagtcctgaagttattttaaatcaactttacaaagaaaccgaccttcaaattacttacaacatcaatatgcttgcacttgtaaagggcataccaaaagtcttgaatttgaaggatgttttataccaatatctactccatcaagaagaagttgtaactagaggattgcaatttgatcttaaaaaagcaaaagaaagacataatgtcttattaggtataaaaattgcagttgaaaacatagatgaagtaattaaaatcattagaggttcaaaatctgatgctgaagctcaagctacattaggtcaaagattcgatttaaatgaagctcaaactaaagccattgtagatatgcgtttaggaagactaacttctttagctattgaaaaacttattacagaaatcaaggaattagaagaagaaattgaaagaattacttcaattattaactcacatgacaaattaattgaactcattgttaataaccacaaaaaaattattgaaacatatgcagacgagagaaaaacagaaattattcaaggaagcatagggcgaattgtggatgaagatttaatcaaggaacaaaaagtagttcttactttaactaaaaataattacattaaaagaatcaacttagatgaatacagaatgcaaaatcgtggtggtactggttcttcaacagctacaacttacaaagatgataatttaaaaaatattcttgtagcaagtacacatagtgatctacttattttgacttcaaaagcaaggatttttagactaagaacacaccaaattcctgatttaacaaaacaatcaaaaggtattcctttcattaatttaattcctattgaaaaagacgaagatattgtttctctacttgtaactcaagaaaattatgaagatgataatttatatttagtaacagtttcaaaacttggaattattaaaaaaacaagtctatctctatacaaaagaatttcaaaaaatggactaattgccttgaatttgaaggaaaatgatgaacttttaactgcgtttattactactgaagaatctgaaatcataatcggagcttctaatggtagatcagttagatttgataatcaaacctttagatcattatctagaaaatctatgggagttaaagcaattgcactagctgaaaatgaagtagttgtaggtgcttcatcaactgatcaaggttcaactgtttttgttcttggtcaagaaggatttggtaaaaaaactcatattgatgaatatagaaaaactgctcgtggaggtaaaggagttattactctaaaaactgaaaaagcgggtgaattagcttttatttcttgtgtaaaaggtgatgaagaaatcttaattttaactaaacaaggaatagtaattagaacttcattagaacaatgcaacgatatttctagaaatacaaaaggtgttaaattaattactttaaaacctaaagattctattcaatctgttgcagtgctagaaaaaattgatgaactttaaaaccaaacagtgtatttaaaaaaacttacttttaaaaaagtaagttttttgtaatttgtttattttaaaaaataatataattctatttactaaatttaaataacaattaaattctgatagtttttaagttgatgattagtatgcatcaaaaaagaattaatttagttgtttaaaaggtcaaaaaattctttttcagaaagaattttaacaccaaggctacgtgctttttcttctttagagcctccattttcacctaaaattaaatatgatgtattttttgacactgatgatgaaacttttcctttattttgaaggataattgactcaatttggcttcttggtctagataaagttcctgtaattacaaatgataaattttctaaaatattggagtgagtttcttcttttattatttcaaaatttacttggattaattcattaataatttgcaaattagcttcatttttgaagtaattttttaagctttcaacagttttttcacctatatctttatcttctaaaaaagtatcaaaattaaaggtttttaactgttctaaattatctactttctgagctaacatttttgctgttttttgtccaatgtgcttgattcctaaagcaaaaattaatttatctaaagtagtatgtttagctttctctattgcatttattagctttaaaatcgatttttgttgaaaagattttagtttagaaatttcttcaattttagtagctaatctaaaaatatcaggtatagatctaattaaattttgttctcaaaaaagttcaatttttttctctcctaagtctttaatatctaaaccttcttttgaacaaaagtgaataatttttcttaactgaatacctaaacaatttggattaacacaaaactgatcaatacctgtttcactatctattaaatcagaatgacattcgggacaattggttattttttcaaaattagttttttcaaatttttctactgattgaataacttgagggataatttctccggcttttttgatataaaccattgagttagtatttatagctaaatctttaatgtaattataattatgtaaagttgctgcagaaatagtagaaccttgaagtaaaaccggttctaaaacagcattgtaagtgatttttcctgttcttccaactgttgcaaaaatgtcttttaatttagtttgaacaactttatctgaaaatttaaaagcaatagcgctgtgggggaattttgaagtagttcctagttcttcataaagtttaaattcgtttactttgacaaccacgccatcaatttcataatctaatttgttttctttttcttgaatttcttgaattaatcgataactttggtgaatattttctttatgttttcctaaattatttgtattaaaacctaatgtttgcaaaaattttatactatctgccacagtatctaaattgtgctcttgtggttgtacaacttggtatacaaaaacttttaaatttgctagtttgttagttttagaatctaatctacgaagtgttccagctgcagcatttcttgggtttaaaaataaaggtttttgaatcttttcttgttctaaattcatatttttaaaactttgaagatctaaaaaaacttcacctctaatttcaatatcttttaaataatttatttgttttggaacatatttttgatcaatattttctatattatgactaacatcttcaccagtagtgccatcacctcttgtaagagcttgcgtaaattttccttgtttataatgaagagaaatagaaattccgtcaattttaggttctacataaaatgaagtattttgatagatttttaaagctttttgagcaaacttttccagttcttcaaaagtataagctttatttaatgaaagcattggttggctatgttttattttttgaaatctttcatcagtttttgcaccaactatttgcgttggagatgcattattttcttctatagtgaataaataaaaatattttttttctaatttttttagtttatttaattcttgatcatagactaaatcatcaacaataggattatctaaatcaaagtaatgatgattccataaatgaagtttttgacgcaattcttctatttgttttttagcttctttttcttcatttttatagtctttttgattattttccataaataattcctaaaaaaatttttaaactttttggttagtatattttcagaacaatggtaatttattcattatttgtccaacgttttgttctgtaataatgactatagctataagcgcaattaaagctaataagaataagtaatcaaatcactgaaatctgattttacgatacttagttcttttagcataaggatcataacctcttacttccatagcattggaaagatcttctgctctggaaaaagaaagcacaaataaaggtataatcaaggtaatcattgattttgctttatcttttttcttaccatttttaaaatccacaccacgagaagattgtgctttcataattctacttgcttctaataataaagtaggtataaatctaattgctatagaaactatcattgcaataatatgtgtgggaataaacaataatcttagtgggaaaatcaagtcttcaatagctttagttagtaaaaatggtttagtagaataggttaaaattgtggttgaaattatcattgcatagattctgagcgcaattactactgatcttacaagtgataaagtcccgatttgaaactcgattgaagtatttggaatttgtcaaactttcattcagtgaacataaacataaatttcttcagtattaagacctaaaagactaaagcctaagtttttttccgtttctgaagctataatttgattagcattttcttggttaatcaagaaaccataaatcactaacataaataaaaatagtaaaacaggtaattttaaaagttttattatatcagttcatcttttggttgtgatatagaaaaaaacaagtgttaatgcaagcaaaatcaacaatgtcataacatgagaaattacaaaaaataagatagcaaaaactatgttaaaaacaatttttaatcttggatctaaacggtgaattatagtgtctcgtggtacgtattttcctacattaatttgcatatttaccttttaatttcaagtttatttcttctgctagttcttctagtgatgcaacatttttaatatctaaaccgcgttttcttaatttctcaacaaagtataataaattggttggcatcatttggttatcttttaaaaactgattatcagaaagtattgtaaatgtatccccatctttaataatttcaccatttttgaaaactattgttctttttgttcattttaaaacattatctaaatcatgtgtagctaaaattattgttttaccacttttgtataaactatttaaaatcgaaagcatatcatctgttccagcaggatctagtccagcagttggctcatcaaagaaaataatatctggttccatagcaagaataccagcaattgctactcttcttttttgtccacctgataagttaaatggcaatttttgaagataagattcatctaacccaactagtttgataatctcttttgctctttttttagcttcttcttttggagttcccatagaaactgcaccaaagattatgtctttttcaatagtttgttcaaaaagctggtattcagcaaattgaaatacaataccaactcttcttctaatttcttttgtaaattttaattttctttgataaaacttgggtttttgtactatgtttgttacaacatttacttcttttgtctttggatttgtagctttataaacaaattcaacacttccttcatctggagttaataaaacattcatatgttcaataaatgttgtttttcccgaacctgtttgacctatgattgcaataaattcattttcatttatttctacactaacattattaagagcttttaattcagtaggtagttttttgttaaaaattttaacaatatttttagcttttatttgcataatacatccaataattcatcttcatcataagttggcttaattccttcaatcaaagaagaaagcttgtaaataaaaggagaatcaattttcgctttttctataatttccttgttatttagaatatgtttaggttcaccatgagcgattaatcttccttgtgaaaagactaataactcatcagctaaaatagcttcattcatattgtgagtaatagagattaaagttttatctccttgttgtcttaacgcattaataattttaacaacatcatattttcctttaggatctaacattgatgttatctcgtcgaaaataattatatctggatttaaagctaaaattgatgcaattgctactctttgtttttgacctccagaaagaaattgaggttcattatttagatactttaacatattaacttttgtagctaaatctatgataattcccttcatttctttgggatcaacacatttattttccaagctaaacgcaatgtcttcttcaactgtggctcctacaaattgattatctggattttgaaaaattattcctattttttttctgatttcaggtaaagtttttgcagacatttcaataccgtcgataaaaactttgcctttttgaggtttataaattcctgaaataattttggaaagtgttgattttccagacccattgtgccctaaaactgcatagtatttccctctttttatatgaagagaaatatcttgtaaagctcaagtttgttgtttttctgaatagctgaaagagacattttctagcttgatcataaatttcctttagtttctattggttttttaatcttctataaattctttttttagaactccaatatatggtaggtttctaaatttttcttgataatctaatccataacctattaaaaataagtcagggacttcaatacctattttgtcaggtgtaaaatctacttttctttttgcagatttgtttaataatgtagctacttttatgctatttggctgtttggtttttaagtgttccattactttttcgatagtgattccagaatcaacaatatcttcaataattaaaacatctttacctttaatgtcgtgtcctaaatctgtaacaattttaattgtaccagttgatttgcttcctccatagtaagaagttgcaactataaagtcaattgtgtggtctactttaacacttttaattaattgtcctaaaaaaagtatagatccttttaataagcctaccaatactaattcttttgaatctttgtaagttgtattgattcattcagcaatttctttaatttttccttcaataaaatcttgattgtataaaattttttctactctaaaatcttgttccatatgttccttttcaaatttacttttaaaattaaaaatctttttttgttgaattaaattttgttattatatcacttttttttcagaaatttttgagtatttttcatacttattttttttaacttttaatttaacatcggactctattctaagaacaagggtaaactcgccttttatactttctcctagtgcttcttttacttgatttgctgttccaaataaatacttttcatgtatctttgtcatctctttaattagaaatatttttgctttattttcaaagactttttctatatctgtaagcgttggaattaacttataaggggaaacaaaaaatatgtaagatacatcttgtaaaaattgttgcaattgttttattctttgtgaagaggtttcttttaaaaagcctacaaaactaaaaggtaaatcaaaacctgataaagcaaaagaagaaataactgcactagctcccgggatgatttcaagacctatagaatttgcgtgacaatattttactaagatttgacctggatctgaaatcaacggagttcctgcatctgagattaaagctatttttttgccttggtctaaaaatgaagaaatttgttctaaagatttatattcattaaatttatgataggaaattaatgttttattcttgattttgtagtaatttaataattttatacttattcgagtgtcttcgcataaaataatatcagagttgtttaaaacttctaaagcacgaagagtaatatcttttaaattaccaattggagtagaaactatagagatttttttcataattattgaagattttcagataaattaactaaaaaactatttttttgtagtatgaaattttgagctgtttctaatgatggaattaaagtatttgttaaatcaataatttcaaaatattttgtatcaaaattcttttctttttgttttagtttattttctcaattttttaaattatcctttcaaaatgaaggaaaaatggaaaaatcttttgacaaaacactaaagaaaaatagttttataaccgaaaggaaaaagaaggcattttcttttgttaatttattataaataaagtttattaattgatttgtttgtttgtaattcttttctaaagatttttgaatttcagatagtaattttgtattatcatctgtaatgttatttttaatttcttttaaacttgagaaaatattaacaaacaatgcattgtattcataaaaattattttctttgtttaaagagtttaaaatttgctttttatcgtcttcataaatattaaatacttggcacctagattttatagtaggtaaaactctttcaatatgctcggttgttaaaataattattgtattttttggaggttcttccaaagtttttaaaattgaattaagaattgaagtattagctaaatctatgtttttgattagtaaaattttatcgttttgttcagaaaatgaagaaaaataaagatcattaaaagctttaattacatctgatttaactatattttcttttatgtctaaagactttaagtttaagtttgttttctttaaatcaatgcctactttatgtagcaaagtttctacatagttgttgattttttcttcatttaagctagcaattaaataggcatgaaatagattattctgagtagcaattatttttgaaaagtgtttcataaatttattaatttttctcttttttcttcaaaagcttttttaatttgttcaaaaactgcctcttcgtttttagaagcatcaacacgaatgattctgtcaggatatttgtcaaataaatatttatatccattggaaactttcacaaaaaaaccatttcccttatcttctatacgatcgtgatctgaactttttcttgcgaatgctttttcaacaggaacatctaatcaaaatgttaaatctggttgtgtgttgctagaaattcaattatttagtgtttcgatttgctgaatatcaatttcatttccaaaaccttgataagcaattgaagagtcaataaatctatcacaaattactatttttccttcttttattgaaggtcagattaatttttctaaatgtaatcttctagaagctgcaaataaaattacttctgttagcttactaatttcgtattttttttctaataataaattcctaataagttctgcttcaggaacctcaaaaccaccaggttctctggttataataatttcagtttgtggaaattggctttgtaaataattaaaaaattttttaattattgttgatttaccagaaccatcaattccttcaaaagttataaacattttgactcacttttctttattttctgttctttatagcttcttttaatgttaattcatcaacatattcaatttgtgcacccaaaggaattcccgttgctaatttactgatttttacatcttttaacattttgtgatttgttacaaaatttgctagcactaaaccttcaatattaaatgaaaaagctacaattaattctgtattttctttaataattttttttagctggttaattcttgtatttaaatgttgttctggaacaccttttttataatcaaaaacaaaatattttccttgataaaatttcaaattttctaattttgtaacatcactagagctttcaaccaacatgatttgtgaacttcgatcagtgtctaaacaaatggaacaaactacattgggtgatacaaaattacaacgttcgcaaggttgtagactttgttttagtttaataattctttgactaagattttgaagaaattcaacgtctttatttaataaaaaataaaaaaacttttctgcttgtttttttcctacgcttggaaaggtcttaaaaatagcaattaattcttcataatccttaccaaacattaaaagggagatccttcttgttttggcataagagcttcgtgttttttattaatttctaacaaagcttcgttaatagtaatgattaaaagttcttcgagagtttccatatcttctggatctgcaagttgaggggcaatattaattttcttgatttctcttccacccgaaatcactaattcgattccatgtcttgaaaaagtaaactcttcttgatttaattttttttctttttctttgatttctttttgcattttctgtgcttgtttcattaattcttgtatattcataataatctccttaatttaatagtttatgataattttctctttttggactgtgtttttctgttaggaaaaatttcaagcaacctgctttcatcacttaatgattctgcagaaagtttagttagaggtactgctggtatattttttaaaaaggttgaattttcctttcagtttttaatagttattttacttaatttgcttgaaataaaaaacaaatgcattggggttttaaaaatatattctaaagttttaattgccaatgtggggtggttttgtagcacctgaataaagtaattttctaattctggatcttcttctgcaagagttactaaaataaattctgaagaactaacaattagttttgatttttttagcaattcataaaaaagagaatattctggattagtcgaagctaatttaactttatcatttcattctttttttatttttatattgatatttttattttgttctatattctgtgtgtatagacggaacaaattatatacttgttcttcacttaaataatcaacaacttcctctgttttaggtgtttgtggaatattattatataaattattagtttcttgataaaaatgttcttgattttgaagtaaattttgctggcattgaaaattttcttgatttgtttcctcagcttcttcaggaacattgtcttcaaaaagcgctagaccttgaggattgttaatttcaattgctttatcttgttgttgagattctaattcgtttttaatttctgcaattagagtatcttgatttagcaatgttaatgcatcttcgttttgtggttttatctcttcattttgcttcatttttgaagtaatattaggcttaaaatcatcttttcaactgtttgttgcaaatggatttgaattttctggtttaactctagaagtatttttaatttcattcaatcaacttggttttttctttttatctaaagataattctgttactaaagctagttcttccatagaagctaatgaagcttctctgctgggttttaaatctgtagtttcataaagatgttttagatgaatgtctcttgggtctggaccattattaaaaacagtttgttctgcaatagatttatcagtagcagaaaagaatttaagaattgctaattgaatggtcattgttggattattggaattatgaagttccttctgtgtagccactaaaatgtcttgaaatttgtatgcagacaaaactgaaaatggaattttttcaatctgatcaagtgaaaatccttctaaaagtgaactatctttagtttttttataaataataaaatttttgactaaagatataagagaactaattaaaatgactggattagcgccttcttctaaaactgaagaaattaaatgaaatgtttgcttaacatcttgactatcaatttttttgataatttcaattagtttttgggtggaagttaaaccaaataaattttctacatcgaccatatgaatttgtgatctagaaaaattacttaattgttctaccatagaaagagcatctcttaagcttccgtatgaaagttgcgcaatagctcaaagtgcttcattttcataggaaatttcttctttttgaagcacaaattctagtctggaaactatttctttttcacttatttttctaaaattaaatctttgcactcttgataaaatggttaaaggaattttttgtggttctgttgttgctaaaataaaaataatatgttttggtggttcttctaaagttttcaaaaaagcattaaaagcactagaagaaagcatatgaacttcgtcaataatgtaaattttatacttagaattaactggtaaattattcacattattaataagttctctaatttcatcaactccgttgtttgaagcaccatccatttcaacaatgtcaaaagaattatttacattgtcttggcactcttgacaaggaataaaagaatcgcttttatgagaacagttaatagtgcttgcaaatatcttagcaatggaagtttttcccgttcctctaggtccagaaaataaataagcatgaaagattttatcagtagaaatgatgttttttaatgtttgaactataaaatcttgacctacaacatcagctaaagtttttggacgatatttcctataaaaagccaagtaattttttgacatattagttaaaaatctccacgattttatttatatgtttttcttctacttttaaaactgcaaaagccaaagcttgtggtcctgcatgaactgcgatcacatctggaacattaaaggtataaattttttgttgtgaataattttccatttcttctttaattttagaaatattttcgttgttggaatgaagtaaaactatttgatatccttctccaaattcatccacggtttgtttaaaaaattttaaaactgtctttgtaaaaatgttaccttttccttctttttgaagccttccttgttcaaatttaatgactggaactatctttaacaacttggttaaagctgctgctgaaggagaaagacgacctgaatttactagatatgaattatcatgtggaaaaagtaaaaatttcccttctatttcttgatttagttcttcaaatgctgtgtcaaaatctacaccattttctatattttctttgaattttaaaatatctaaaactgtaagaagagaaagtttagtagaacttactacttttacgtttgaaaattctcttgctaaatttacaaaattttgatactgagaagataaatattgactaattggataaagaataactttgtcatattctttacttaatttttcaatcatttgctgaacttcaccgagtaaagttgttgaagtttttactttggtgttcttactaattaattcgaaaatttctccttcttttaagtcaatgccatctttatattctttttcatcaacataaataattaagggtaaaaaaaacacatctaacttatgtgctaattgaggatcaagtccagtagatgaatctactactattgctattttcataataactgaaattataataaatttttacagttctaataaaggaaaatgtaaaaactaaaaagttttttattacatttaactaattaaaaaaatatataatttaacatatgaacgatttacaaactaaaaacagtaaagaattgaatttatcttttgattttactgttaaaaaacatgaatacagaatacttgatattgaattaaacggaactttaagaaatcttgaatactcaaatagatattttgaatggtttattgaagacttactttattttttagatatgaacagatatcaaaaaagatgagattatgaaacaataaatatttttaatgtacaaagtttgaaactaaaaaaagaagatttagaaaattttataggttattttaaaagtgttactaactttaatcttgtagcaaaataaaggaaaatgaaggatttattatgattatttatgtcaccaaaaaaacttctcctttttatactttaccaatggaagaactccttttaaaggatccaagtataaaagaagatattatgtatttttaccaacatgataatgcaattattattggtaaaaaccaaaatatttacgaagaagtaaaattagatgtagttgaaaaagaaaaaatcgaaatttacagaagactttcaggtggtggtgctgtttatcacgaccttggaaatattaatttttcttttattacaaaaaaagaaaacaataattatgaaaaatttttaacacctattatagaattttttcagtctttaggcttagatgctaggtttaaaggaagaaatgatttagtggttaatggagcaaaagtatctggtaatgctcaaatagtttataaagacagaatggttcatcatggaactattttatttgatgctaatttatcaaagctatcagaagtattaattccaaataaattaaaaatagagtctaaaggtattaagagcattagacaacgtgtaactaatattttatctgaactaaatttcaaaatgggacacgatgaatttattgaaaaattaatttctttttttgaacaaaaataccatacaaaaagacaagaattacctaaaaaatatgatgaagaattaaaagaattaggagaatttaaaaaatctaaagagtgagtttttggaaaaaatccttctttttccttcaaaactcaagcaaaaacagatggtggaattttaacaattcttgctaatattgataataatcaaatttatgatattgcttttgaaggtgattttttatctcaaaaaccagtagaagaaatttatcatttgtttatagatcaagaattttctaaagaaaatatttctaaaattttagattctatagatttagaatattattttggtgctattaaaaaagaagaaattattgctttatttttcggtgaattagaagggaaataaactagtatgtttacaagaaaaagtattgacattgacggcgaattaatttcatatatcgaagaaaataataataaacctaaaattttatttttacatggttttgcttcatcaggagaatctgcacaacaactttataatattaaaaatagaacttatgatattattgctttagattttcctggttgtggtcactctagcactaaaaaacctattagtattgagtattatcagtttattgctaaaagatttgctcaagaaatgaatttgaaggattttatagtaattggacactctttaggtggagctagtgcactttatttacttaacgaaaaagttgcaaaaaaagctattttaggcgctcctataaattatgatatgcttcattcaactagtcaaaaagttaaacaaaaatgactattacctgataatttgcaacaagcatatgaaagtatggattcacttgtatttgctgataaattaggatataaaaataacttaaacaaaacagcagaaagattttttaattttatgtctatcagaaagccagcttttttagatatggtaataaatgaaattttaaatccttcttaccttgaaaacaacattaaaagtctttatttacaaagaaatgactatgaatttattataggagaaaaagacttatttgttacttataattcaattatgtctgttgctgtagaaaataacaaaaaagtgcattcacttccggattgtggtcatgcgctattttttgaaaaacctgaagaaattaataaaatcattgaagatatagttaaagaagtttactaataaaaagctaataaaaaagagccaaaattggctcttttttcttcttttttgaagaattattttattttttccctcttttacgtcttcaaagaataactatgaaaataattgggaataaaattaagcaagcgtaaattatgaaacaaataaaatgtctttttgatctaatacgatctatgtctatttctcttctgtatacttgaccaaaaacagcatcaatatttgcaagtctttttcttataactaaatagtttagtaaacctaaaacaaatacaactgctactcctgcgtacattaatccacctactagttgaggattttggaagtgtttagttaaaaagttagctactaattcttgaattccttgaagaatttttttacccgctgtatctgctacttgtgtaggttgtgtacttaaaaagaataatacagaagcaaaaattaaaccagcagttacaaaatatgcagctattcagcttctagttacttgttttaaagtaagtttttttactatatttggcagaactcctggcattgtaaatacagttgagtttgcttgtaattgttctctaaaaatttttatagcttttttagtagctccgcgatcaattacacatttaataaaactaaagaaaaataaaatcgctaaagctattgggaaaattaataaaccataattatattcattattagaaaaaaacttatttgctttttctgaaggaaattgagttcctaaaaatcttgtaacaattacaaaagcaagaaaaatgaagcaaagtaatgaaataattatttgtcctaacaagattctggtttcagatccaaagatcttttttacttctttttctatacttttatttctattatcttgctgacctggatacatttgctgaccataaggtggttgctgatatggaggatattgctgaggataaccttgttgtggataaccttgttgaggatagttttgttggtattgttgtggatattgaggtggatatggtgcattaggattttgttgaaaatctggttgatagttttgattttggttttttttcttaaataacattaaatatctcctttattgtgtactaatttaattgttaattatatagattatgctttatcttttgaaccaaattctaatatttttttctcaatagtttcttccattaatttaattccaggagcatacatttttcttgggtcgtaatttttaccttttttgatttctccagaaataataaagtctgtaattcctttagcatttgctaattgtaattcagtatttatgttaattttagaaattcctagcttaatagcttcttggatttgatcagttggaattcctgatccaccatgtaaaactagaggtaattgtgtagcaaaagaaagagtttttaatgtgtcgaagtctaaagattttcaatttggaggataaattccgtgaatatttcctatacctgcagcaagcattgttactcctgcttccttcatttttaaagcttcttctactgaagctatctctcctagccctacaactccgtcttcttctcctccgatagaaccaacttctgcttcaactgaaacatcttttttagaagctgcagcaaccacttttttagtattttttaagttaacttcaaaactttcatgtgaaccatcatacataactgaagtaaatcctgttttgatagctgctaaacaagtttcaactgttccatggtcaatatgaagaacaacaggaattgtgatttttaaaaagtccattaaatttgttactaaattaaagactgtttttacgcctcccatatatttaagtgcaccttctgagattcctaaaattacaggtgaatttagtttttgacaagttgaaagaataactttaactcattctaagttattaatattaatgtgtggaactgcataaccatttttatgtgctttttgtaaaatttctttagcatttactaattttttcatagtatctcctttatttttaattattaacaaaattgtgtcttagttttcaaacattatttccaaccatcataaaatgtccgtcaacagtaagaagtttgtataattcacctttttttctgattaaaatatcttcgaaagttaaatttggtaactcttctttccattttggtaagaaatctttaagtatcatattgaataaatcatcaaaactaagttctgaatttcgttttagtgcgtcaattgctgaagttattaaagttttcatttttacatcctttcttttgtacttacgcctattaattttagtcctattttaagaacaattcctgtagcttttgctagtgctagtaaatttgcttcattgggatttccaataattcttgtatttgaataaaaagaattaaaagttttcgctaaattaagtaagtattgatttaataaattaattttatagttttttgtaattgttgcaataatttcgttgaattcttttaaagtatttattaattttatttcattttcttcagaaaaagaagtagctttgtatgttttaatatcagattttaaaagtaactgtgcaattctagcataagaatattgaattatataaactggattttgatctgagatttgattcgcttgatctaaatcaaaatctaagttggtgttttcgcttctgttaatcataaaataacgaatggcgtcttttgaacaaagttctaataaatcctttaaagtgaaggatgttcctcttctttttgacattttgagttcttcgttgtttttgattaattttacaagttgataaattaaaaaatccactttatttggataacctaaaacagataatgctgacttcattctctgaacataacctatgtgatctgcacctcaaacattgattaatttatcaggtttattctgttttattttttggagatgataagttatatctggagcaaaataagtatatgagccatcttgttttataaggactctatctttgtcatcgccaaatttagttgtttttaaccataatgcgccatcttgtttatatgtgtctggtaaattattgatagtttgctctatttgttttgtttcataaagcttcttttctgaagaaaaaacatcaaaaaagatgtctatttttgctaaatcctttttaatttcttctagaaaaatctgaatacctgtttttttgaaaaatttcaaaatgtcttcattttcaagactttgagcttcgtatttgttatttactagcttaaaaatttgttgagctactcaaacaatatctgttccaaagtatccgtcatcaggcataggaaaatctggattaaatatttgttggtaacgagcaaataaagatttagctaaattatcaatttgaactccattatcgtttatgtaatattctcgaataactttgtttccagcgtgttctaaaatattagataatgtagctccaatagttgcacttcttacgtgccctaaatgtaagtaaccagtaggattggctgaaacaaattcgacattatatatttgattttgcttcaaatttccatatttttcatcttttaaaataatatcatttacaatgttcgcatatgctgaatgagaaataaaaaaatttataaaacctggttttacagcttctactttggcaagaaataatttgtctttatcaattttatcgattagttgattagcaaaatctaaaacatctaacttgtatttgttaccaataatcattgcaatatttgttgaataatctgcatgcgattttgaaggagtaagaactatattttctttataacccaagccattaattattaactgaagttcttgcttaatcagttcatctatttgcattatttttttcctacaattacaagagctggttttataactctgtcatgtaatttataacctatagatttaatttcaattatagtttcattatttgaaacgtcttctacttgataaacactgtggaagtgtgaatcaaatggttcaccttttttaggttcgattttttgtacaccaaaagattctaaaacattttctaattgtttatacaacatttcgaagccttttacgtagtttgagaccgctggattttctgtactaacaccaaagtcaattgctgattttaaatttgaaaagggagaaataaatgactctaagaatttttgtaaagaaaacttcttgatattttctttttcttcttttgctttttcgtacaactcttttttaatttcttcaactctttcagaacttttggcttctaatttttgaatcttatttttaaattcaaattctgctattttatgttgtgcttctaatttaagaattttagattctaaatctctaattttctctaaaaattcttctttttccttcttgttatcttctggattttcttcctttgattcttttttagattgttgttttgcttgctttgatttttctttttttggtgtttcttgctttactgattcttgttgttctttttcttcaacagtttttgactcttcagtagttttattatcttgtgcattttcttcttgttgtttttttcttaaagcttcttgcttagcttcatatcttgctctttctgctcttctatgtttatgtcaaagttcgataatacctgccattgaatatccttcttctggtgtatcttcatcgttttgattttcatcatcttcttcgttttcttgttcagtttctgttgaatcttcaaaaacgctttcttttaataattcttcgtctgtaaatttattttttttgttttccataatgctcctttaaattttttacttgggatttttttgtttatcatttaataattttttatctttattttttagaaaatcttctaataacttgatacctgtaagtatagcagaataattcattttattagtggaacctactatgcttaattctttcaaatttgaagattctggaaattttttagaaataaaagatgtttcttttgattctatgttaatttttaaagtctcttgcttatcttcgggatgtaatttttctaaaaattctcagatagagtttttttctataatttctaaaatatcgattaatttttgtcttgatatatctttgtttaaaatcaaagaatttttattatatatttgtgaagtgtgttgtatttgaaaattaaaaatattctccacaaaatgtttcaataatccatctgtatttttaatttcctgagataaaattgggcttaaaatttgtagcgtggtggctatttggctaattgacgtccctagtagtctttctttgaaaattctaattgctatttgaacatcgttttttgaaatagattcattaaaatgaattatcttattttctacttttccgcttgaagttactagaactacaactcctgaagattcattaataattgttaaatgtattgacattaatttttcattagtattgtttgttgtagcaactaaagttatatttgcgatatcagaaataattcttactgcttcagagacagtttcatctatcgaagttctacgttttgcgaagatatcttctaatttttgttgtaagtcattattaatatcatttgctaaaaatttagcgtaatactcatacccttttaaagttggtattctaccactagatgcgtgagatttttctaaaaatccttcattttcaaggaaaagcattgcatttctaatggaagaaggggcataatctaattcataatgagtttttaaattttttgaacctactggctgaccagtttttatataaagttcaattatgtattttaaatatctagctgttttattttttaattcttgcatactatttagttagcgctttttctacttcttgaattaatttttcttttgggcaatattcaaaatttttaaataaaatttctccatcttttaaaactaattgtgttggaacttttaatacttcaaatcttgtacctgcttttctaaataaacctgattcttctgcatttactttaataatttgtacatttttattgtctttgaaatgttctgatacagtttccataactggttgcatcattttacagtctccacatcatgtaacaaaaaattctaataaaactacgcctttttcgattttttcttgtgcttcttttcaaagtagtgtttccatatttgtttaaaaacttttataaataagaaaaataaatttttatatttttaaatgttctttatttttcttcttaatttaaagttttactcctttatttattgttaaatttgataatttttttgacttttttacaatagatattgttctatatccaaagtaaattagtcctaaaactagtagtaaaaaagacattgaaattataccatattgcgacaatatactgccaaataaagcaaaactagaacatgataaaaaaccttcatttcaaataaaaggctgataagaattgtttgatgaagttagagaatttcatcaaattaatattgaattttcagataaaaatttaggatcataatttgacatttttacaaagtattgaaaataaatagtaattcaatttattgcaaaaaaagtggaaattatgaagaaaatatctcacttttttcaactaaaagctttaaaaatgaaggtagttttatactttaaaataactaagataaaacatacataaataacgggagtaaaccaaccaaagctattccaaacaagtaattgcttagagtatttacaccatctactttaataaataaacttataaataaaaataaaaatataataattaataaaattttaaaaataattaatactagatttgacttaataattttcataaaaagcaactataattactggttctttatctatagctttaaagatttttctttttatacttttttgtattttttcttgaatttcttttatttgattatcactcatttttgtcttagaaactgctgaaaactgagtaaaaactacatcgtttataattttatgcactttttctttattgtctttagttaaaattccatatgagctgattataagttcagaaattaatttttttgtttgtgtgtctaataatgctgatactacgattgttccatctctagaaagtgtttctctttctttaattacttctgtagaaatatccccgactccgaaaccatctacaataacttcacctccatttttaatagagtgtttttgagaaatcaattcaccatcaaggaaaaatgcaacttttttgttttgtaaaataattatgttttctttttttactcctgcacgttctgcagtttttcctgccaccactaaatatctatacaatccttgaattggtaagaaaaattttggttttaatacttttaagacttcataaatgtcttcttgtgaaggtcttgttctataaaattgagtttctgtaatatcaactaattgtcttgctacttttgctatttcatctaaaactcttgaatgtagaacttccataccattaattggtggcgctaacataataactgaatctgtttttttaagcttaaaaaaaacatcatctttttctaagattctaaagaatctttgataaattctttctggtgtagaagttattaaaataacagaattatctattttatttgcttgtctgaaatcaaaaaattctggatagtgaatatctagtttttgcttttcagctagtctttgattcatttctaaaagattatcgtagtttcttccataagtggctacttttcttttgtatttataagctaaatcaaggatttcttgtatagaaagcatctcttcatcgtatgctcctactataattctggaattagattttgttgttaaaaatgtttgttctaaaaattttttagcaaatattttgtctatagttttacctggataattagcccttgatgaatcaatcattgtcatcaaaattggtttatcagattctaaagattttttaagaaaatttaaatttgtatttccgtaaattcctaaattcccaacaataaagttagataaaaatagaattaaaccatcttctgtttcaaagttataaccataaattcctggaatagaaccagctaattgaattggttttacataaacatcatcatcaattttgatttttttagttaaagaaacaatttcatattgattgtttgaaattttgtatttagtaagcctttccaaaatcaaagcttttgtaaatgatgaacaaaaaatcttcaattttggtactttcattattaatcaaggaagtgctgaaaaagattcatttttagcatctgttaaaaaaacaccttgaactcttgaaaaattttcttctatgtatgaaaaatctggaataacagtgtcgattccaagtgaattactaagtggaatttttgctcctgtgtttattaaaaatattgaattatcaatttctaaaacataggaattttttccattttcgtcttgacctccaagtgcaaaaaaactaattttagccatctatctcctttaattttggtgttttttatatatttcttctaatttatttttagttttttttaaagtatcaaaaacagcagaacgagttactgctaattctgtggcaacttcgtttaatgaaagatcttctacaaaatataagtgaaaaacttgtttctgattttgagttaataaaaaagaatattttttaaataaattcattcaatattcttttttttcaagcaaatccaattctttattgttgttcatattctttaattaaatctttggtaagagcataaataaaattatctaaatcaaattcctgtaaatcatctattttttcacccaaacctattaatttaacatccatatctagttcatctttaattgaaaagatgattccaccttttgaagtaccatccatttttgttaaaactattcctgaaactggggttgcttctttaaaatgtttagcttgagaaattccattttgtcctgttgttgcatctaaaactagcaatgactcatgtggtgcatcaggatatttattttgaataattttgtttacttttttaagttcgttcatcaagtttactttattttgaagccttccagcagtatctataattaaaacatcgtaattttctgcttcagctttttcaagcgcacgataaactacagaacctggatcgaattcattaggattgggttttaaaatatcagctccaactctatttgctcaaatttctaattgttcaacagcagcagctctaaatgtatctccagctgcaataagtatcttttttccttcttttttcaacttatttgctattttagaaattgatgttgtctttccagaaccatttacaccaatcattaaaataatgtttaatctatcttcttttatatttaaatgagtattaattatagacctatttgcatagattgtatacattttatcagcaattaattcattaattaattttgaatctgaaatattttgtttttttacttcttttttcaactcatctataataacatcaacaaaaaatggagaaatatctgacattattaaaatttcttctaattcttcaaaatattcttcatctactttaagtttagatttttgtaattctattaattgttcagaaagtgaaatgtttgctttgctaagaccagctacatatttatcaattttttcttcttttaattcttgtttttgcttttcaagttcttttttttcctttgcaatttcatctaattgcttttcttcttctgtttttttgcgcccgaaaattttctcttttaatcttttaaaaaatgacatattgtttttaattataaattaatttttatttttatctgttcagactaggaaattttcttcattttttcacaatttttttcttttttacttggaaaataaagaatttttattaaaatattaaaacattatttaaacagcaaaatgatatttattttaaaattttaaatttgcttgaaatttgttagtaagaatgctgttatccgaaaacattaaatttaaaattcaaataaagaatcattttcctttttattaatgaaaaatataaaggagaacaaaatgtcacgttatacaggtccagtatttaaaaaatctagaagatatggattttctatcttagaaacaggaaaagagtttgcaaaaggtagacaaagaaaatatgctccaggtcaacacgggcaaagaaaaactaaattatctgactatggattacacttatacgaaaaacaaaaagttcgttttatgtatggaattaatgaaagacaatttagaaatactttcaaaaaagctacaaaaaaacacggagttgcaggtacagttttcttacaaacattagaatccagattagacaatgtagtttatagagcaggatttgctgaaactagaagacaagcaagacaattagttaatcacggtcactttttattaaatggtaaaaaagctaatattccttcaatgataatttcagttggagacacaattgaattaacaactaaaaaagaaggaaaaattagaaaaaatgttcaaattcttgaatctcttgaaaaaaacagaacagctgaatgaattaagttagaaaaagataaatttaaagcaacatttgaaagattacctgaaagaaaagaattaaatccagaaattaaagaatctctaattgttgagttctacagtaaataatataattattacaaaaccagaagaatcatttcttctggttttattttacttcttttttataggatttattaagtaaaaatactttccttaaaatcttttgtacttcatttgtaaatattaatcatagcttttataaaagaaaaaagttctgtattatcatcataaccttgttttaaagaatgtgaattattaaagtctttatttagtatttcatctacaattttttctaaatttttcaaataaaatgaaggttcttctacttttgtacttccttggaattttgtatattcataattaaaatcgctgatttttttaagtttattttgttttgctaaaacttctttatacatagcttttttaaaatctttaaaagttttatatttattatctacattattgagtttgaatattttttgaaatacttcatcatctgtgagtctgtttttacctggttctaacatcatatttgaaatataaggaagcattcctttttgataaccaaaagctgcaagtaattcaaaagctattcttctaaaagaataatctcctggtgatcctaatttattctcggctgtagctcaaaaggctttaaacattggaatttgatagtatcaatctttcttttgagtaccatatttcaaagtgtttgtcggtgtaaaaattattaaatcgttatctataaaatcatttatagagtttaaattaatccttcttatttcttctttatttagtttttgtatgttgttttgaccacttgaatatgttgtaattttagctaaaaaatcaacagctctttctggtttattttgtattaattttataagtgcatttgcttgtgtagcttcaagtaagtaaattaaatcaaaaagatttttgaaataattttgtaaatcttgttcagatttaaattgatatggactagtgttagttaatttagtatttcatttggtttgtctgctgtatttacttcctgttatttctttatctttaatattagaataatctttgattgtattaataccgaaaaaatcttgatttgcttcataagtagattcgaataaacctcttgcaaatagttcgggtccaagatctaatcttctttgatgattttcgaataaaatacttctgtcataagcatgagtgagttcatgtgaatatgttgctcaaccaaaatctgttagtattctagcgttttggaaatgaacaatatcttgtgtttctccataataagcttgaacttctcctctgtgattctctgaatttgagtaataatcaattaatggaccaaaaaagttatagtatgaagaaatatcataatctactcttggatttaatcatctatttttctggttttgatcaaccaaattaaatccatctactattaatgtagttctaaataatttcatttttgactcattagaaattatcctaggtcaaaaatcagaccaacttctttgagctacagcagtttgcttgattttttcttctaattcctttatttttgaaggattctttaaatctatataactttcatacatacccacagataaagaatttatagttgaaattatgtaaatagtttgctctggtaaggtaagtaaaacaggaattcaagctttgtaatttggatgattttttaacttaaatcaaattttgtttgctttggtttcgtcgttagattcttgtaatgttttcaaatcatcattttttgaattttcttcaattatgtatgctttggttgtattcttaaatcaagtatttacatctaatgaagaaatatttaactgattttctatagcatcaaaatatgttttattaactaatggtttaaaattatcgtcaaaaaaagtaattatattttttgacttataagtatctttatctaccacaccctgtattttattcttatcatatctagaaggataccaatgtggtaaatattgtttaaaatcattaggtaaatctattaaataatctagtattgaaacttttttatttttattaaatcaatttgaaaataaaagtcaatttttaaagttttgggtatttatattaaagttgaatcatctatttaaatatgaaagaacaaatactaatttttctttatttttctttatttttgtagctaattgttgtttttgctcatctgtaatatttgctgaattaacataagaattaaaaatattagaaataatttcttttgctttaatttttgtttcattaaaagatttttctaaaaataattttttaagatcagtattattagcagctaataaagcattataattatctgaatataaattaagtgttgataaatcacctaaatctaatttaactgaattttcattattgacaacaaaaggaatatataaaagttcattattattgttttttattttatattctacaagattgttttctatattaaaaaattcaacatcatataattttgttcaattattttcaaagcttatttttaattttttaattaaattatctggattataatttttaacttcttcatctttgtcatttagatgagttatcgaaacaatgtttttgccttcaaagaaattcttcaaactttcttctattggggtatttttgttgatagaaagaaaagggattgatgtatgtaacacaggattagaaattggatttttaatttcgttctccattttcttagcactgtcttgtgaagcttctacatcttgtggatttagattaataggatctttcgaaactgtttctgtatttgtgcttgtttttacaatttcgtctttaattttttcttcttttgttttagtttcacctaaagaagcattagttttactaggctctgtagaaattgcgtttttgcttgatttttcttcattttggttaggattttcttgaataacatctatggatttggagctattttcttctttttgagaagattcatttgtatgctcatgtaaatgatttaaatctgtgttttttgaaggaatatcaggtgttttgtgattagaagtgctatcagatttgttaattttacttttttctgtgttttgactctgatttttttcttttaaattattttgtggtttatcttgtaaattagattgttcagaattattattaagcggagggttctgtgaagattcttgtgaaggtttttctttattttcttcatcaatttttgctattttagaaatattatttaatgatttgttttgtaagtgttgattattattttcgttgtcagaaatattgatttttctgtcagatgaagaatcttttgtttcattttctttgttttttttattattttgcgggtgtaaactattatctttataaatatttaaatcttgctttttgtcttgtatttttgctttagaataaattattcctaaagttgtagaaatagcaataatagatgatgctaataatactgaagaaattattgtgattttcttcttagaacttttcatattcttatattataaatgaataaatttaaattaaatatcaatttcatcaggatttgtaatctgcaataaaatgtacaacattactcttttaattctactacttgtatatcgtttagaattaactctgttaataaaagaatcaaaatcaggagcatcaatatgctttttaaacagattttggattccttcagaaactaaatggatttgagctaattcttcggaagatttttctctaactattttttgaaattctggataatgattttcgattctatcaggaatagaagaaaatttcataggactatattgtgaaatgtcttcatttttatagatgaatttacgtaaataagatgcggaagcaaaattatcatctggggtttctgagtgaaaatcaatagttctttttaagcaataagctttaatattataattattaaaaacaatggctttaacatattcaaaacctaaaatatcattaggtaaagtaataactgtgcctgttaattctttaagagctagtgctgaagcatttggaaaagaattaccttgttttaaaaatatttttattagttgattatatttttcaaaattatttttaattgtagtagctaaaaaatacatttgatcaatatcatctgattcagaaccgaaaattaatttatctattttattttctgcaataatttctattgcaccttgagcaaaaatatgagctgcttgggtagaatatttaaaaggtaatttaataacctcatctgctccaaattttaaagcaaactttttcctagtttcaaaatctgctactgctaattcgcctctttgagtatattttccacttaagattacaacaattttgtcatttggaaaatattttttaacataatttaattgataaatatgtccattatgaaaaggattatattctgctattattgctattgacatattaaataattatattattttataatattttgatttaaaaataacacccaaaattgggtgttattttaaatgattattgaattttaatttataaatagattttatgctgctgtagtagttgttccgttaatttttttaattaaattgtttaaagctttttcattactttttgcatcatcttcattaattagcattgtaggaatacctaaaactgttttgtaatctgttggatgagcttggatttgagctttaaaatctcttgttgctgcatctaaaaattcttgagcttttgctttgtctgcatttgcaactgtagaattagaaacaccaacaaaatcatctgaaattcctttataaactctagcgtttgctggattgtttaactggaatgatctaaatgaacctaaaaatgatgaattttcttttttaagataaatatcagttaatacttcaaaaattgttcttcccaaacgcttttctactgaagtaaagaaagctgtagcaggagaaagtgctttagattgatctgtatctactcctattaagtattttgttgaatcatttgattttttaattgaatcaactactgaacttgttaatgaacctgctactggaaaaataagtgcagatttacttactaaattatttataagtgtagaagttgtaggattagctacaaatcctgtgtcaatattaattttctcatctgcgatttttacttttgcagttgggctatcgctattgtattttgctattccagctaaaaaccctgcgataaagtcagtaactcctgctccatgaccaccaccaaaaggagaaatagttctttttgcttcatcatttgggaatttatatgctaaaaatttagatgcagcataacccgcgatgtaaccggcttcttctgttttgtataataatgaaataaagtgtcctggctgaattaagtttgtatcttcttgtgataaatctcagtctactgcaattattattacatttttctctgctaataattgagcatatgttttaccatcaggagcttgttgttttaaaaaattaggaaactctataccttgttgaaaaccagttaaaattcatacgttttgatctctattaaggaaatttttatatttaccaataagttctgactgattattagtttcttctgaaactctatcttttatactagttttaccaatttgaatgtagtgatcctgaacagcttctcaaattgattgattaaatgatttatcttgaacagtaccaccagctgttaataaaactgtgttaaagtcaaatgctgttttatctgcttttgctttttcaacttcttgttttctatttgcaacaaaagaattgtcaaaaagtctagttgaattagtttctccacaagaaacaaaagttgctactgatgctactgttgatattgttcctgttaaaaataataatgattttttaatattcataaattcaccttccttagttattaaatgtataatttaaaattataatataccataaaaataaaaaatgttaagttttttattttctaccttaatgatttgtcataagggagaccaactgcttttggggcaatagtgttttttgatgtaaaaattaatattattaacgttactagatatggtaataaatagaaaatattttggtaagtttttacactttcgaaaattccacttccattaccaataactgtagtaattgaataaattaaagaaaatatgatagaagctattcctatataagcgacttttcatcttcccataattaaaatagttaaagcaataaaacctaaaccactaacgtttccaccaaaacctacacctaaatattgtgatcagatactacctgcgattcctgctaaaaatcctgagattaaaacaccttgtcatttgtagaaattaacattaatacctgcagcatctgcagcttgtggattttcaccaattgattttagtctaagacctcattttgtgtacttaaaagctataaaaatgaagacaaaaattaaaattgtaataactacttttaaagaaataatgtttagaaaactagaattatctgtagaagctgctagttcttttaaatcatactgaaacttttgtgcattggctccagtaaatcttaaaagtaaaacagaaattgatccagctaataaattaatagcaactcctgaaattatatgattacccttcaattttatggtaataagtccgtgaagtgctgaaaataacattgtaattaatgaagctagtaatatcacaactaacgacattatcggactaacggcattaaaagactgtgcaagtaaaccaaaaaatgttgctcctataatcatcataccatcaattgctatattaacaattccaactctttcactaaaaaagccagaataagtagcaatcataataatggaaagaaataaaaagaagaaaactataatttgttctaattcaaccatgttatttaacctcttttttagattttttacatatttttgctttaattttgtttattgtaattaacagttttttttcttctatggctaaaaactcttttaaatccttcttaaacaaattatttaaagcaaagatattagctttgtgtttttgtttttggtattttaacttgtcataacctaaactatttaatttttcatctaattgttttcttttttcatgaattttactaaattcagcaagtttttcatcatctgatatttgtttttgagttgaatttagtgttttaatatttttatagttagttaaaaactcattttctaattctttttttaatttttttcattctaatttgtgttgtgcagtagattgtttaatgatttttttacttaaacaattatgtttaaaatgaaggattattaatctaaagtaagttgtaaataaagcaagatttcgtttattatattgattttgtaagtaatttattttgtcttcaactatatgaactttttcttctaaaagttctgaatttttccttttttttgaactagtttttaatttactatctttttcttttttaaaagttattcactgttctttttgttgagattttcaaaaaacctgtgcttttataagtaaataagctttataaatgaaggtaagtggtttaaattttgtaaatacaatagaaattgctgataaataaactacaataccaaaaataatagaaattgaatttgaatcaagattataagcaatactttgtaaattagaacttccgctaaaaattattgaataaaataaagaaactaaaatagaaccaattggtgaattataagcaagaagtgcaattaaaatagtatcaaaaccttcttttaatggggctctagcactaaacagcatatttttttgtaaaatcacatatcataaaaatccagcaacccctgcaattaacgctgaaaatgaaagagaagaaataacaagaattttttcatttgttccagcatattttgaagcatttaaatttagtcctgacattttaattttgtaaccaatagtagttttttggaatacaaatcacattaacgttgcaaaaatcaccaaaataaataacatcataattataaaattattgctagttgtaaaagtaggtaaagttacagactgagaaacatcatcgcctttataaaagtttcataattgagctgaaaatatttgataaaacaagtaaaaaattattcaattaagtaatatagttgaaataacttcattaattttgaaaaaggcttttagtactcctgcaataaaaccaataaaagcactaaagaaaattccaactaaaaatgctaggaaaataaagccatttgagactggttcatttattttagcagaattaattaaaataagtaatgctactcctcccgatgtcatcatttgaccaggtattcctatattgaaaattcctgctttaaatcctgttcctacagctataccaccaaaagtgaaaatgataactaacaataatgtatcataagtttttgttgatgaaaacgcagtattaaaaatatcttcgattacctcgaacggacttgcacttgaagaaataaaaataaaagcaattaatagaccaaaaaagatagatcataatgaattaaaaacttttcttcttgttgaaatagactcattattgaaaataaaattcattatttttgataaattaaactcttttatttttgtaaaaacattagtcattatgcacacctcccatcaatattcctatttgttctcttgtcatactttttgcacttcttttttcagatagtttacctttattgataaccataattgaatctgctagagcaaaaacttcatcaagttcatatgaaattaataaaatacattttttcttctttttttcttctaaaagatagtcataaatttggttaatagcaccaacatctaatcctctagtaggttgaacaacaactaataatttatgctctgaaaggatttcacgccctactactgctttttgttgatttccaccagataaagaccttgcaagtgcatttccacttccatcaccacgtacgtcaaatttttgttgaatttctttataaaaattttttaaaactttattttttataaaactaagtttttgaaattttggattataaagttctctaataattgcattttctctgatagtaaaatcaagcacaattgcatatttatgtctatcacctggaatgtgtgaaatacctgctttgtttttgttttttactgaaaaatttgtgatatctacaagctgacctgaattgtctagaatctcaatttttccttcttttggctttaaaattcctgaaattacaagctcaatttcttcttgaccatttccttcaacacctgcaatacctagaatttctccttctttaatttctatgttaatattggaaatttctttgttttgcttagcaaaaatattagtcatccgaaagcctgttttgtctgataaaattccactttgattttttggtattacaacttttttaccaaccattgcttctgataattcatcaatttgaacattttttaaagaaggaaaatgttttacaacttttcctaatctaattactgttgcttcgtcagcaacggattttacttcatgtaatttatgagatatgaagataattgtttttccactatttttaaaaaaacgaagaatgtctaaaaatccttcaatttcttgtggatttaacacagcggttggttcgtcaaatactaaaatatcagaatctttaaaaagcattttcataatttcaactttttgctgagttgaaactgttgcatctccagtcttctgatctaaatcaaaatgtaaattatattttttttgcaatagtgaaacttttattcttgctaactcatagtctacaaaaactttattttttaaaaattcactacctaaaataatattttctaagtttgtataagcatcaattaatttaaaatgttgatgcaccattccaattcctaaatcttttgcttcattaggattttgaataaaactactttttccatttattttaatactaccttgggttggagtataaattccaaataaaatcgacattaaagttgatttaccagcaccattttcaccaattaaggcatgaatagtacctttcttgatattaatgttgatattatcatttgcgacaaattctccaaacttcttagttatttgaataaattcaattgcattttgattgtggtttaacatagttggaattatatagttttttttattatttttaaactaaaaaattatttattattttttttaataatatttattaagaattttttagttaattgataacttatagaattagggtctaattttggaaaatattttgatattaacaatcttcctgaatttctattaaaagtagagcttcaatttctatgatcttgtttgtgtccttgttgaaaatcaacttcttttaaaaagaaagaatagatattactaataatcattttttctttgctgatcttttaaagatttgtcaaacttataatttatttttaaaattaaataagctttagttttcttgttaaaaattctttaattataaagcctatagctgttgaagattcaatacaattattttcatcttctaaaaagttgctttgtaatacttttaaatttctataatacattatttttgtccaaactttttttaattgcaagtccaatcgctttagctaacaacggaggaacggcgttaccaatttgtacaagttgtcattttttggaacctttaaaaataaaatcatctggaaaagattgcaaggctgctaattctcttggtgttaaaactcgtggtaattttggatggatattgacaccaccgtggttttctttaatagtgcaactaggttgatttcaaggagatttttttcaaccatctgaatagtttttgtaagcgctttgtccctctggagtatttttgattctttcttccatttcttttgaatgttttgtaaaaatatgatttatttctttattttcttctaaatgcatatatttttctatacattcaccaagagttttatagtctttttgttgtaatattggtttaggaaaataattaattttgttaattttatttgctataaaaatcactctttttcttatttgagcaactccataatctgcactatttaaagtagttacatttatctgatatcctatgtttttatagtcatttattattttttgttctacttgtccatttaacattgttcttaaaccttgcacattttccataagaacaaattttggttgcaaatttatgactatttctaacatttcaagatataaactatttctgggatcatcaactactctatttcctgccatagaaaaaccttggcatggaaatcctcctgctattagatcaatatttgtatttttaaatttgttataaagttcttctttgactttagcatctctaatatctctagtttcaataagttcttcttttttgttcctattttgaaaattatagacataagttgctactgcttcaggcataatttcaacactagcaattggctcaaaacctgccataactaaaccacaggataatccacctgctcctgaaaataggtctataaatttataaccatttttataattaaaatttcaaccgtctaatttatttatttcttttaacacgtcaatgaaatgaactttttcttcaatttttcctatttttttattactgtttacttcttttttataggataattttcaatcttgataatctgagtctaaaattaaatatttattattttgttttatagaaattaaactttttttagctatttcttttctaatgaatttttgactcactgcttctaatttagcaatttctgaaattttataatatttcatttagactcctttacgttattatcttatatcaagattatttttcttcatttttaaagaaaaataaaatcataaattaatatgattttattttttattatctgtatctgtttttaaaacagctaaaaaagcttcttgtggaacatcaactgtaccaaaggacttcatacgttttttaccagctttttgtttttctaagagttttttacgacgagtgacatctcccccatataacttagcggtaacatctttacgataagcttttattgtttctctggctataacttttgagccaataacagcttgaactggaacttcaaatgaatgtcttggaatagtttcttttaatttttctgttaattctcttccttttttgtatgcaaaatctttgtgaacaataattgaaagagcatctactttttgtccatttaataaaatatctaattttattaaatttgattcttgataaccaattacttcatattcaaaagaaccataacccttggacatagattttaatttatcaaaaaagtcaaaaataatttcagataaaggaagaatataaactagttttcttcttgatttgtctatgtattctaaagattcatacactcctcttttatcttgacataaacccattattgaacctagaaattcttcaggaacaaagattgttgctcttatatatggttcttcaattttttcaatttgtgtaggttcaggaaaaaaactaggattagaaatagaaactacctctttgtttgttttagtaactttaaattcaacagaaggagcagtggcaactattgataaattaaattcacgttcgagtctttcttgcaaaatctccatatgtaaaagacctaaaaatccgattctaaaaccaaaacctaaagcttttgaagactcaggttcatagctaattgaagaatctgatagtgaaattttttctaatgaatcttttaataaattgtaatcttgtgaatcaacaggataaaatccggtataaacaacaggttttaattttttataaccaggtaaaggttcttttgctggattagaaactaaagtaatagtatctccaactgaaacatcttttgcatttctaattgaggctgcaattcaacctacttcacctgctacaagttcttcttttttaagctcttttggagttcttacacctagttcaataacaccaaattttttaccatttgccataaatttaaattcatcgcctactttaattgaaccagatacaattcttactaaaataataactcctctgtaaatatcaaaataagaatcaaaaacaagtgcttttaattctttatgattttcatctacttttggagctggtattttagttacaatagcgtctaaaactgcttcaatattagtaccgtttttggctgatattaaaattgcatcatctgtaggtgtacctatagcattttctacttcttctttaactctatcaacatcagctgctggcaaatctattttattaattattgtaattatttctaaattattttctatagctaaataaacatttgcaagtgtttgagcttcaattccttgtgtagcatcaacaagtagcaaagcaccttcagtagctgctaaagaccttgaaacttcataagtaaaatccacatgacctggtgtgtcaattaaatgaaaaatatagtctttgtaatgaagctgcactgcatttagttttatagtaattcctcgttctttttccagatccatagaatctaaatgttgtgcttgaagttctcttttttctactgcattagttaattctaaaatacgatctgctaaagtggacttaccatgatcgatgtgtgctatgatagaaaaatttcggatttttttagcatccataacaaattactttttaattagtgtaaaaaaatctgatgttgtggtgttgaaaattgtagtagaagcttgttggctagcagaatttttataaagaatttcagcaactggtctaacttgatcatggtgtatgtcttgttgagatcagataattattcaagttattacaacaattgctactataatgatagcaagtaacaagaaaaatagagctactctttctgctttatgtctttctttaaatcttaaaaatcttttataaaaaataatgttttcttttggtttttgaccttcaacgtctctttgaattgttggagttttaatttgagtatcatcaataaaatactctttggcttgtttatttggttttgacattttaaacttctatttcaacatatcttttagatttttagaaggtttaaattttgccaccatttttgctggaatactaacttctgatttagtaattggattaattgctgtagattgttctttaaaaataccttgaaatgttccaaatcctgcaattacaactttgtctcctcttttaatttgacctgttactatatcaaaaaatgaatttaatactgcttcacactctttaaatgaaagttgtgtttcatccataattaattctaatagttcttttttgttcataatgatttcctttgtattgataaattatttatattttactttattttctttatttttctttattatttttgtaaattatttttattgggcaaccttcaaaaccaaaataattcctaaattgattttctatgtatctttgataggagaaatgaattaaatttttgtcattaacaaaaaataaaaaagtaggaatttgtgcttggatttgttgagcaaatttaatagttaatttcttacctctaacacttggtggaggttggagcatttgaatatctaaaacaaactgatttaaggcatttgtggaaacttttttttctaaattattctttacttgaattattgtatctgttaatttagtaattctacttcctgtttgtgcagaaataaaacaaataggggctcaatctaaaaatttgtaattttgcttcattttctttataaaaatattttgagtgttagtttctttagcaattaaatctcatttgttaactactaaaataatgggtttttgtttttcaaatgcataacctgccaaacgagcatcaaaatgtgataattcttgtgtagcatctattaaaatcaaggataaattagcctcatctaaagaattaaaagctcttaatagtgcataaaaatcaacagattctgctattttagattttctaataatcccagcagtatcaactatttcaaaatccattttatctatttttataaagctagaaactgaatctctggtagttcctgcgatgggcgaaacgattgatctattttctttagtcagcgtgtttaataaagttgattttcctgcattaggttttcctataattgcaagtttaaatgcttctttttccttctcttttgcaaaatctaagttatttattgttgcatctaataagtctccaataccttcgccatgaatagctgaaattgggaaaatttcttcaaaacctaaagaataaatgcttgtatcaaaaaatttatttccttctaatttgtttgctgcaattaaaacctttttatttgattttcttaaaagatcaataacaaaataatcgtctgaatcaatttcagctctaccgtctactaaaaaaataattaggtttgcttcttctattgcgatttgtgtttgaattctgataagctcttgaaaagatttattttctacctcaattccaccagtatcaattaagtaaaattctttgcctgatcaagaaacttttgaataaattctgtctcttgtaacacctggactattgtgaattattgaaactttttttcctactaatttattaaataatgttgattttccaacatttggtttaccgattaaagctacgatattcttcatttttaaagcaatttctgttcaattaatttacaaatttgattaactacttgatcaaaatttaaatgtgttgagtctataaaaattgaatcttcggtcttatggagagggttgactttacgattcatatcattttgatctcgcttttcaatttcttctaaaattgtttggaaattagtttctaaatttaattctttgttttgttcaactcttctttttgctcttatttttgaatcagctcatagaaaaatctttaattctgctttaggcataacaacaaatgtagtatctctaccttccattattattcctttatggttttgttgaaattcttttaaaatatctacaacttgttctcttatttttggaaattttgcaatttgtgaagcatttttagaaataacatctaatctcaattcatcttcaattttttgcttttctaacaaaatagaaccatcttctaaaagttgtaaaaaagaattgcttcagtgttttaaaatttctttctcactgtcaatttttacttcatttttatagcaaaaatacgcaatagctctgtaaagtgaacctgtgtttacgaataaataattatacttttgtgcaatagtttgtgctattgaagatttacctgcaccggatggtccatcaatagcaatattaatttttttgttcattttactccaatatttgtaatatttaataataacaaattttaattatttacaaatataaaagcttattttatatagttccgatggtcccaatggaaataaaaacaacaacaagaccataaattgcagaaattgtaagccctaatcctacacaaactactaatgacattccaaaaattttcaaaaatgttttaagttgaatttttgattttgcattatgttcttgtttacgatattttaatttcaaactgtttaaataatattcaaaaaacataatttatcctttaattgttgaaccttgtcttgaaattgctcttagaattctttttctaaatccaaaataaattataaacattggtaatattgctaaaatagctcctgccattctaatgttttttaagaaaggaattaatccttcaccttcatctggatttctaccaacatctaataatcaaatattaattactttaatattagagtttccttctaaaatcaatagtggtcataaaagtccatttcaagctgcaaaggctgtaagaatacctaccgttcaaattgtcggactcactaatggaatagccactttgaagaaaaatttaatatttgaacaaccatcaaccatagctgcttctttaattctatctgagatttcttcgaatgcatttctgaacataaagcctgaaaaaactgaggctgcaaatggagctactaaagctaaaatggttccgggttgtttatttcataacaaaataattacaactctgtattgacctattaataaagctgtttctggtagcaataagatagatagaaaaattaatcaagaagcttttttgtattttcatttttttaaagaaaatgcatagccaaaagtcattgaaaaaaatatttttccaataactgaaattagcgtaattagaattgttcaacctaatgcttgaccataaccttctgcaaaagcttgagaaaaattacttcattctaatgtttgtggataataaactaaaacccttgagtcaattacttgctcttttggtgctagtgcatagataaccatgaagtaaaaagggaaaataataaatagaccaaaaacaaataagactatgaatttaagaagaaaagatactacatttttccacaaagatacttcttttacttgagaagaaattaagtttgttgcttttcttgtttttaaatttgctaacttattccttcaaaaaattagtagctttaattttgttgcgtacatgtctttctcctaattttgaaataataagtaatatagtatttattccttttttaagcactattgaaagggctaaaccataaacaaataaataaatggtagaaactcctgcataggtaaattcagaatctttaacttgttgatagatataaattaaaattgttgttccaccattactttttgctgttccagcatctggaaaaataccaattggaaatactttaatacccccaataattcccattgtgattaaaaagtttattgttttagaaactgaaggtaaagtgattttgaaaaactgtttaaaaggacttgcaccatcaatagaagcggctttgtaaagtgtaggatttactgataacattgctgtagttaaaattaaaatttgaaaagctagcgaacgtcatacacctgaaaataaaataactattaaagcgttgaaagaatcttcttgtccgctttctaatcatcttgtttttgtattaaataaattgttaataaatccgccttctgtagcaaaaacatatgaaaaggcaagtgagacagcaatccctgatgtaacatagggtaaaaagaagacagtttgtcaaaaacctctagctcattttctataaatgcttgcaattgttgaagaaattaataacgaaataagcaaggtaataggaagagaaattatggcaaaaatagttgaatttcttatcccaatttgaaaaaatggatcttgtaaaacatctgaaaaagctgtaaatccaaaatgtactgaggctttgttattaggatcatcatttattaaaacagattctttaactgcatatataaaaggaagcaaagtaaataacaaaattattaagatggagggtaataaaagtagtaatggttttcaaaacttttcttgtttatgaaggattccaagttcaaaatttgtttcttttttaaacattttaaacttaagtctatatcacaaattcattacagcctctctcttgtatctatatcaaataaatgaagcttagaagtggaaagattgaagaaaatgtcctcatttttttcataatttgccttatttttcaagaaaatattaaatacttctacattttcaactttaactttggctaaaatgtcttttcctaaatattcaacagactcaatttttcctttaaaagaataattttgtgagttagtttcaattaaatcttcagctcttattcctactctaatttggtttttcttataagaaatgcttcttttttgaagctcgtttaataaaaataaatattttggagtagtcaaatttgctgtgaaaattgtcatttcaggtacacctaaaaatttggcaacaaattcatttttgggagtgttataaagttctaaaggagtaccaatttgttgtattttcccagttgacatacaaataatgttgtctgaaattgacatagcttcttcttggtcatgagttacaaaaactgtggttattcctatttcagactggatttttttaattcattgtctagtttgaactcttaatttagcgtctaaatttgaaagtggttcatccattaataaaatttttggatgtctcactattcctctagcaatcgctactctttgttgttgaccacctgatagtttagttggttttttatgcaagttttgtgtaatttctactttttcagcagtttttaatacttcattattaatagcagtttttaatgaaatatcttctgatttaaatttattgtatttttctttatcggattctgataatttagttaaatttaaagaatatttttgaactagtgctttttcaaaatctaaatataaatttaaagttagttgttttgattttttaatattttttttgttttcttttaattcaatcagttcagctgaatttttaattttttgtttttcttgttttatttgttgaattaattgatttttttgttgtttaaaattatgttttatttgtttaataacttgagaaaaatagtcttgaagttctgcgttagatttaatagaatcgatgttgtttatagaattttttacttcttttttgttgatttttattgatttaaaagaagaaagaaagtcttttattgcaaatttaattttgtgaaaaaacaaagcaaatttagaatttaaattaggttgtgaatttatataattattaaaattattctttctaatttcttttagtttagaaattgtattttcatttaattttttaatttctgtttctttataaagctgaattaaatgttttttattatttaattcaaacaagtttttataaagatgtgatttttgattattatattgtctttcaacttgtttataaacatcaaaataattaaaaattagtttattatattcttcaatttccttctcagaacaaccgtttgatttaaagacaataacatttgcttggtgtctagcatataaagatttttctcttgttttttgttttcaaacagcgtcatttgttaaaggaaaagcgatattatcataaacatttaaatgaggataaagtgcatagttttgaaaaactaaacctaattttctatcttgtggagtactttttgtaacatctaaaccttcaaaaagtatttctcctgaagtcggggtaattaaacctgctatagcatttaaaattgttgtttttcctgaaccagaaggtccaagtaatgtaactaattttcctttttgaatttgtaaattagccttatcaactgctaaagtttcaccaaaatctatagttaaatccttgatttctatagctcaattatctttttgagacttaaatcatttatcagctttttcttttgttttattaataaaattaattttgtcttgattaacttgcataattaactttcttataataacttatttattttgttttagtcaattaaaataatctattatgttttcgtctttagtttcaggagtttttatgaaagtaagaagattaccagttcctcttgtttgaaatacatctgccatcatttgtaaaatttttttagttgatgtatctgagtttaataatttataaaaaccatattgtttattaattgcattttctataactgcggattgagccagtcctcaataaaattcagtagaagttttatccggaacttttttataatctcctgtggttactgaaagacctgcttgatttgattctacagaataatttctataaattccatcatgacctattaaaattgagccaacaaatctttcatatgattttttatgttgaccggaaaaaacaaaagtaactttagaattaacaggaattaatttttctgcaaattctgttgcttttgttgcatattcatactctaaacctgttgtttgtgtatattgattaccttctttttttcctttttcaggtgtatcaatgtctttgattctcacattaatggttttaggtcaacctggataatttagcgaaattgtaggagtatcaccatcgtttcatctaactatagtggcatctaaagatgtaaaagtattttcttttgatggtagtgaatatgcaagtccttgatatctgtctttatcttcttgtgttcattgatatgagtggtctaaaaacttagctatttctttaaaataagtactttgtgaattcttgatatcttctagtggagattgttcaaaagtatctattttaaagccaattttaggaaagttttcggttggtgaagaatcatttagtgaaattacttgtgaagcagaatctaaaattgaagaacaagagacgaaaaacgaaacaggtaaaaatgaaattataggaaggaaaaagaaggattttttatgttgaacgagtttttttattagcatatttatttaaatgtaggaccaagattggtttttaaagttcctaaaaatttgtcaaatgtgtctagtttatttccggttttttctctatttgctacggtagtaaatgtagttactattgcatctctaaaagtgctagattttgaatcaactgcatcttctaaaattacaaagtcatttggatttgcttttgcttttttaagtacatcaaaagctgtttttgaaccaactcttaattttggattggtttcatttaatgattcattagttagagaaatatagtcagtttgggatttaaagaattccattggtgtaagttgtttatgatctttttctcagtcttcttttgaagttaagaatcattttacaaattcaattgttgctttatcttctttttctgtagagtgaatagcaaataggttagggccttgtaaaggaattatagcttttgtattttgtgaagtatatttttctggtgaagctaaagaaatgagttcatctttgtttagtttagctgaagctttttgcgaaacaatttcattagttgctttatttaagaagaaaatatcaaatgaattgttttttacaagttgttttcctactttttcaattgattctgttggtattgaattagaagaaacataattaccaaattttttatctgaagaaatataaaattctgctgttcctgctaaaatgcttttaatttttgtagcagctgcttcatctacaactaaagaaccacttagtagtgtttgtggttgatcggtttctgaaaaaacagcactttctttttgtgtacctaaattttttaagtaaccaattgctttttctacttcttttttaggtgttttaattaattcaaaagtgaatctttcttctatattttgacttttaacttctgaatttatttttgtttttaaagtgtaaacgcttttgttttccccagtgttagcaacaaaattatgtgagtaccctgctgtagaacctattgcgaaaagaagttggtgactttttaaaaaatctgaagaatattctcctttgccactaatttttaaagtttcatcttgtatgtaagggtataaaaattcgaaaacttgtttcaagttgttgtaactatctgtatccttcttttgtgaagcagtaaagctaacttttctatctttaacttgaacaatttgttttgatctatcgccttcacttattgaagaagaaagaacataaacagcatttgcaattgcatcaaatcctataacatttgatactgtatctaaaacactatctccttctgatgcttttggaaatgattttttaactctttgagctaagtctaacaaatctttatagttagtaaatttttctttagaaaattcgaaaccacctagaccaccatcttctttgttaagatgtttatattcttttcaaagtttttctatttcttttatatcatctgctgatttggtatcttttgccatatcttgatattttttaaaaaatgcagtatcttcagatttaatagttgctggatttgttgtagattctgtagctttattgattataaatcctaataaaacaccatcaacacttaacatttcagaagacttactaattggaatagtataaattacatctgctgattttcctggtattaatgtgttgttttttaagaatatttcagaaaagttgtcatttacaaaagtattaatttcattttgatcttcagaatttttctttgaatcttttgtgtctaccacaaatggaacactcatatcataagagtttatatttgctaaaacagaatcatagttaaataataaattaactaaagatgttttgtcttgtgcttttaatttttgtgaaattgttgaagcggctcctgaataaccaccttgaaattccattttatctgctggtaaataattagggaaagttgcttttttagttgcatcaaattcatttcattttttaatgattgcttgaattgcttttgcttcacgtcctgtagaagaaaaagaatatcctaatttaattacgccatcttcttgttgatcgaatcttgttgttgtttgaccacaagataataaggctaaagcaggtgaaagtgctaatgttgctaataaaatttttttagttttgttaaaagatttcttcattttttcctcattttttcattataaaaaaactcaataaaactttatttgacttcaaaataaatgcttttattgagtttgtgctaatcatagcctacattatataatatttttcaaaaaagtaaatttttttaattttatatagtaaaaatcctaaaaaattattgaattttgttaggtaaaaataagtttttaagatttcttacataagaatcgtaatcatgtgtagcattaggattggtttttatttgattggaataattttgaaacgctatagtaatattggttcttaaacgacctgataatgctcctgctggttctgaaaatatagcatatttctctggattgtcttttacatttttaaaagtttcaaataataatttaaacaatctgttgtttggaaattttgttttatcgtttatatcactaattaaattagagtttgtaggagctaaataatttcctctaaatgctaaatattcgtttggggttccttcaaaggtttttgatactgtatctgcttctttttctttataagtgaaggttattttttcagtgataaatcattttaaaaagtttgcagtagctaaatcttcttcattgttagagtgaatccctattaaacctggaccttggaatgttactaatttttttgcactatttttatcttttttattaggttcaattaaaaaatggatttcattctcgtttagagatttgtctttgtcaactctttcatgtttaacatttttagttgctgttattcacgctagtttgtcattagtagaactgcttagatgtaggttatcaaatacagtaaaatcatcaagtttaccacctttaaaatcttgatttttgttaaagaaataagcacttcaaacacctttagtttcttcattttctttgctatttaaagagtttatcaaatttaaaaagtcagaattttcttgtaattcgtgagtttttgcttgtgtagaatttgcatctcattcttctactaataatttattatcagttgtttttttgacagtaaaagatttgaaatttaaagaataatttacttgttgagtttcagactgagttcatcaacttgcttcgggaatttctaattggttatctgtagaagtaaatttgaacaaaatattttgttttgtttcttcatctgttggtgaaaaagcaacaaaaacaggaactgaagaaacatttacactattttttagttcggattttagtttttcaggatctttcggatttggcttaaattctagaatattaattttttctttaggtgtagcaaatctttgtttatagttagaagtggtagtgattgcaaacaacatatgatgatcatttaagaaaagattagaaggtggattgccattgactaaaccataaaaatataaagaaccatcttttaataacttgtcaatttggttgaaagtttttaatccagtttgatatcttggagaatttttctcatctaaaaaagttgcatattttataactgtatctgaatcatttttaggactattatttttttctaaactaaataggaattttttaaaatcagcatctgcattagcaaaagctattgagtacattgaatttccaatatcatccagacctagaataaatttctgatttttatttttattttcttcttcagtaaattttgtaggaaatgattttctgattcttgaaattaaatcaaaaaaatcttcataattatctaaagcattttttgaaaatacatatccatctagcccaccattttctactaaaataggaacataatctccccaaacttttttgatgtatttactatcagttttttctttatctaagttttcaaatcaagatttatcttcttcttttactgttgcttttcgagtaccagtttttgtggcttcttctactatgtaattaaataatggaccatttataagtaaagatcttgaagattttagtgttggaagtattcagtatttgcttgggtctaatcctgctatttctttactttcttgtaaaaagtttttaggaaaagtagtttcaattgcttgatttagttcaggaaaatcagaataatttaaactcatattgtattgtgaagcaacagcagcaagtgtaggataaccaaaaattaaattaataagttgattagtgttttttacctttagttgtttttcaagcgcttcaccttgttgggcatatgttggagcaaactgaccatttaattcaattctatcaaaacccactttttcattttttacattttctgtattgtttcaaaggtctacgatttcttttaaagctaaaaatctactttcattgtttttaaaagtatgagcaataactaattttttatcattaacttgatcaaatcttgtagttgattgacatgatgctaaaaatactgtaggcactaaaattgcagacgcagttaaaagtttagaaattttatttttgaatttcatttttcccctattttatataaatttttttgtgtttttaaaaataaaattttaccaaattactttatttttttgtatttttttacaataaatttacctttatcttctgaagaaacttcagtaaatttgtctcattttaattcatttaagaaaacatcgcctgagtgttctcctttaataaaagaaataatgagttcatcacaatcattgacaatacttttatacaaagtgtatccaccagaaacgtataaatgttttgttggatgatctttatactcttttattaatgaagaaaaatcatttattgttttgacattttctttttcatatttaaagcttttatcatctgtaataataaaaattttgcttcatttttgaagagattctggaagtgtaaagaaggtatttttacctactaaaatatcgtgattttttgtttcttgtctataaaaatcaaaatcttcttttacatatcaaggtaaatcatcaccttttccgattaaattattttttcccattgctaaaattgaaattaccatattttcctttgttgactttatttgattttattaatttaataaaaaaattttaaacaaagataaagaaaaataaagatttttaagcatttttgctttttttagtaaaataataagactatgaaattacaactaaaggctttgttaagtgcattagtcattgcaactccaataataacagtattatcttgtggttcaacacaatctttttcttctaaatacttaactggggacgaaaaagagattgaaaaatatgtaaaaattaatccaactacagaaattactaatccagataatacaaaaaccagtatttttactttcactttagatttatcatctacagatttaacacaaattcctgaaaatgctttttataatgctgaatctagaacatatacaaaagcaggaacaggtgaaaataaaaatgtttctgttgtatataatctatcaaaaattatttttcctgctactttaagatctattgaaaaaagagcatttttcttagaccctgctatttatggtcaacaacaaagaaaattagaacttgatttttctaaagcaacttcattaacagaaattaaagagcaagcttttaaaaacaaccaaattagtaaattggttttaccaaatagtttaagtgtaataggcgacgaagcttttgcaaacagtgaaattgaatctatcagctttacaagacctgaagaagaaatttctttatcaaaagttggtattggagcttttttcaataataaattaacaagtttagatttagaaaagtttaataaattaacttctatttcaaaagcagcatttaaaatgaatcaaattgcttctgttaaattacctactaatttagaatcaagattgaccattgcagaagaagtattttcacaaaatcctataaagaaagacgacgttattgtttcagatacaaacaaaataagtattcatagggaagcttttaaataattattaaacatttaaaaagcactggattttcagtgcttttttcttcttttttgaagctaaaataaattttagcgaattttttacttttactttcttgcttttttttttttttgttttaataattatctatgaagaaaaaacaattaattttattaagtgcattggtttttgtgtttccgacaactgtgttgttatcttgtgaaacaacaactactaatcaaccgacaccaaaaccagagccaaaaccagagccaaaacctcagcctaaacctcaaccagaacctattattagaagaaatcaaaacagtaatactggttctccaaatactacagttgtaaagcctattaccgcaaaaccagaaaaaactcaagagtctgaaaataataatagaataaaccctcctaaaacagatacaaaaagtccagtaaaatctgaggaaaataaaaaacctgtaactcctgaagaaaatccttcaaaaatgaaggaaaatgaagcaaatcctttaactaaaaataaagcaataaaaacagttgaaaacttattaaataaagctaaagataatcctcttgttcaaactgcagtggaaaaagctgtaaataaagtagtaaataaaactgtagataaaattgttgaaaaagtcaaaaaagtctttaaaaaagaagaagctaacaaatttactaacaaatacatcagaggtggtgacgggaataaatatgttaaattagagactgattatggttattgagaaaaagatctaaactataaaaaagattctagatataatgatgaaaattataaatattctctttttagcagaaatcaaaatagtgcacctgattttggtagaggaactatatatttagacaataaagattttagtaactattattatagaaatgatgaaaatactttgaaatttaaaatgtttactttagatttaagttccactaacattacagaaatccctgaatttgcttttagtacttgagaatctagaacagttactattactgataaaaacgaaaaaaccacatattatttaggtaatgttatttttccaaatactttaaaaactattaaagaaaaagcattttatttagacaagaaaaactttgaaaaagaagaacaatttataaaattacaaaaaattcctcttcaatttcagtgagaaaacttaataagtagaaacgatcaatttcaagactatggtgattcagatataggtttaacaacaataggtgaatctgctttcgaaaacaacacaatgccttgattaatgcttccaagaagtttaaaaactatcgaagataacgcctttaaaaatgctaatatttacaaaatatcttgattaaactgaattgataatggttattcaaatagagacgattgaaacaaacttcaaattagcaaaataggaaaatacgcatttgctaataataaactagggacaagcctatatacttatggctacagtaatagaagttattatggtagcaatagtgtaaatactctaaacttacaaattgatcctaggtatttaaaagaaatttctgagggtgcttttataaataataaattacaaaatattattttttctaatgaaaaaaccgaagattattcttctgcaacagattttacagttgataaattagcttttgcaaacaacaatattagtgagattgaattccctgagtatcttaaaaatctaacaattaaagaacaagcatttatagataataaaattgaagaaatcacattaccaaaaactaaagatgttaaaatcaccattaatagtaaagcgtttgcaaaaaatccagtacaaaaagtcaatacctatgaagataatagaattaaaattgtagatatatttaacactgaaaccaaaactgtaaatgttcctaaatgaatgactaaaaattcacaaattgataaaaaagcttttaaagaataatgttaaaaaatagcaacataagttgctatttttttatactccactgggttctttggtataaaagggttgaattgttaagatgtttgtttctagttggaaaatttttgaaaatgcttcaaaattgaaggaaattagttcataatctacctgactaagttctttattttctttcaaaacttgaataacgtctgatgttaatttgccttgttttgcactagcactaaaaaagtgtaaaccggatgaattaatgtagtaagtttcttcttttttgtttgtaaatgataaaagtgaaaatgtatttgtagttcaaatatttgcattagttagttggcaaattgttcttacataaactaaagaaattctacaacctgtaaaatagccaggacctaaattaagataaaaatctgtgatttgtgaaatctttattttatttttttctagtgatttttcaatgatatttgcaagtaattctacttttttcgactcttttattatttgcttatctataagtctaaaatctttatcaaaaaggaaatacactaaaaaatctgatgtagtatctaaaaatatcttcataatttatcaatgaatattgaactctctttcttcattttcaagcatttttataaaaattacaactgaattattatacaaaaatttaagtttattagctcactcaattgccacgaatttatcttcaaaataatcttcaaattctgataaatctgagttgtaattgtcaaggtcaatgtgaattaatttgttatatgaaaacataaaattaaatgatggggaagtaatttcttggtttatacctaaggcttttgctaatgctttaacaaatgcggtttttccagctccgaaatcgccgataagataaataaattgtttatttaaagataatattttatttactactaagtgtaaatcttctatagtttttactaaaattttttctttgttattaagtgtattaattaaatgattatagttcataatagattaaaatttgcttcatttttatagctttttattcaaattttactatgttatttaaaataaaaaaataaaaattaaaactaggaatttcctagttttaattttgtatattatttgattaaaaattaatgatttttattgatttgtggcttaaagaatgaataaggatctctaatatcatattttgatttgtgttcaaaattagagtttgttcctgctggaattttatgtccaacaataatgttttctttaagaccttctaatttatcaacctgtgaagaaattactgagtgaaccaagatttttgaagtttcttgatatgatgcagcagctaggaaggagtttgaaagtaaaggaatttgttttgctcctttgataataatgcttccaaaaggaggttttttaccttcagcaattagttttccacttacttcttgataatcaaaaatatctactattgaaccaacaaagaaatctgaatctccgttgtcaataatttgaatttttgaaagcatttgtctaataataatttcgatgtatttatcagaaattgtaatcccttgcatacggtaaattctttgaatttcttttaataagtaattttgtaatgttcttgcatcagcgtaatttagtaattcttttagaataattggaccttcaactagtttttgaccaggtattactttatcaccaatttgtactcttaatttttgatttgaagcaactctaattattttgtttgcatctaaattttcttcatttttgtactcaattgtaattaaaattgaacctgtaagttgtccatcttctttatttttaactgattctattttagtaactactccgtgaactggtgaaatttgtgctggacgtcctcaaggatgttcgtgagcatcgattagctcaattaaacgagtaaatcctcctgtaatatcttcaacaccagcaacccctcctgtatggaaagtacgcattgtaagctgtgttccaggttcaccaattgattgagctgcaataattccaactgcttctccgatagctactaatctgttagttgctaagtctttaccataacattttttacatacaccatttttagtgtggcaagataaaatagaacgaatttcaactgcttttacaccagaatctactattcttctagctaactgatcgtttacaaaatctcctgatttagcaagtgtcataccatctggacttactacatctttatttaagaatctaccttcaattctttctgctaaaggaacaattgttgtatttgttttagtgtcaataatttgttttactacaaatccaaagtcagaaaaacaatcattttgagtcacaacaatgttttgagctacgtcaactaaacgacgtgttaaataaccggatttcgcagtgttaagcgcagtatcggttagacctttacgagccccgtgggttgaagaatagaactcaaatgaagtaagaccttccaagaatgaagacttaactggaacttcaacaattgaacgaacaactctttcattttcagcgtcgacttttaaagctttaacgttgtttgccatcaatccacgcataccagctagttgaacgaagttagacatatttgatctagctcctgatttcatcataataactagtgagttttttggatcgagttcaacagtttcgtttagattcttttgaatttcatttttaacagctgttcatttattgatagaaagaatataacattcatcatcagtgattcaaccttgtgaatagaagcgatttagttgatttatgtagtcttcgccttcttttaaatactcttgtttttttggtgcaattttgatgtctgagatagccatggaaacaccagagtttgttgagtaaataaatccaagatctttaatgtcatctaagatagaagctactacgtttgtgtaattaaatcaaactttttcaaggatttctactttatcttttacttcaaaaaccttgattttattagcagaatgaattttattaattctagttaaacgttcaaattctgctgttgtaaaatcagctaatttaatgcagtgagttaaagcaagtggttcacctttaaaatcaagtaattttctatataaaagtatagaatcttgatagttttcaaagtctaatttgttgattacgcttgctacatcttcttttgaaaccacatagtcataagtgtcgaaaatttgacgaacaatttttgctatatcttttttagtaagcgcaggatttaaaggtaaattttgaatatactcaggaatatttgttcccattggaattaaatatttttctagttgagtatcataatttagctctaagttatctactttattgtcaaaaataaaagggaaattatctgggaaaattctgtttagaatgaattttcctactgttgaaattatgtatttattttcatgtaatgaagcagattttgctgtttttacttcataaaaaggtaaggcaactctagcatgtaaatcaactacttttacttcatatgccttcatcatttcattataagaaccaaaataacgaccttgacctttagcatcatctttttcttgtgaaagatagtaaagacctaaaatcatatcttgtgatgggttaacaattggttctccatcttttggacctaaaatgtttttgttagcaaacattaattctcttgtttctctaatagcttctggtgaaattggcacgtgaacagccatttggtcaccatcgaagtcagcgttaaatcctgttgttacaagagggtgtaattgaattgcttttccacgaactaaaacaggatcaaaagccctaattgaaagacggtgaagggttggtgccctgtttaataaaattggtttgttttttataacttcggcaacgtgaggtcaaatttgtggattttgttcttcaatcatctttctagctgtttttattgaaggagcgctgttttgttcaattagccttctaataattcaaggctcaaagagttttgcagccattctacgaggtaatcctgcttggtgcattttaagttttggacctacaacaataacagatctacctgaatagtcaacacgttttccaagtaaattttgtctaaaacgaccttttttacctgttaacgcatctgaaatggatttaagcggtctgttgtcttttgtagtaacaggatttggtgattttctttgattatcaattaaagcatcaattgcttcttgaatcattctaagttcattttgaataattaaaattggagcatctgtttcatatcatctttttaaacgattatttctgataataatacgacgatataattcgttaacatctgaagttgaatgacgagcaccatctagttgaactaaaggacgtaaatcagctggaataacaggaagattcttgataatcatagattttggatcttgacctgagtttaaaaatgcgttaataacttgtaatcttttatagagtttgtctcttttttgatttttagttgaatcttttttagaaagactggtagtattttgaacttcttgaatttcttgttcaacttttactttctcagcttgtaaatcaagatgatctaaaagatattcgattgctttagttcctgtagaaatacgagcatctgaatactcttcaataatttcatttaattcataaaaatcaattccgtaatcacgcccgattttagaagttgcaacttctgttaagtcagtaagagcggttgaaatgtcttgatattcttctgattcttctgaaaatttttgaagaatttcttgtagtgcatttttataaataacaccagcttctgagatgtcaataattttgtttttagataaagattttaaaccacctgtttctaaaactatgtgggatttgtagtaaattaaagactctaaagaagattttgaaacaggttttccgttttcttcgtttttaagtcctaataattttgaaataattgagtgatctattttgaagaatcaaaagtgtaaaactggagaattaagagcgatgtgacccattgaataacgacgagctatttttggaagaatttttgattttaattcttcacattctttagtagctacacaaattgtgttttcgtttgattttttatattttttaccacaaacaggacatttgtagtcaattaatggaccaaaaattaattcatcaaaaagacctccacgttctggtttgaaggttttataattgatggtttctggcttagttacttctcctcttgatcattctaaaatattttcaggagtagctagagctaaagaaattttttcaattgtgttttcgtaaatttttgcatattgacgagaaacttttgtatcttgtttattagttgtactcatttaatgttcttcctttcttatttaaaatgatcaaattcttcttcagaatcttcattatcgtagtcttcgtgatagtcttctactttagacatttggctttcaaaatactcttgatcaaaagcatcttcaagaagtatttcttcagaatttgaaggatttatttcttgttgttgttcttcttcattttcttttttgtgaacttcaagtttaattcctaatcctctaagttcataagctaaaacgttgaaggattcaggtgttcctggttttggtatttttccaccagaaactaggttgttatataaagcatttcttccttgaatattatctgatttgtaagttaataattcaagaagaactgatgaagctccaaacgattcaagagctcaagtttccatttctccaaatctttgtcccccgttttggctcttacctccaagaggttgttgagttgttagagaatatggacctacagaacgagcgtgcatcttgtcatcaaccatgtgttgtagttttaacatatacatataacctattgaaacatcattgtcaaaaggttgacctgtgattccatcatataaagtaaatttacctgattctggaacacctgcttgttggaataattccttcattttgtctaatttcactccatcaaacacaggacaaacgaattttacatctagttttttagcaaccattcctaaatgcatttctagaatttgtccgatgttcatacgagaaggaataccttgtggatttaaaaggatatctattggtgttccgtcttctaaaaatggcatatcttcaactggtaaaacaagagaaataacccctttgtttccgtgacgtccagccattttatcaccgactttgatttttcttttttgagcaataaagactttaattatcttctcaacaccatcttctagattatcaccttggcttctagaaagaatttgaacgtcgattactgtacctccatctccgtgtttaacttttagtgaagtatccttctgagatgaagcttttttacctcaaattgcgttcattaatttttcttcaggtgttggattatcttctccttttggtgaagtacgacctactaaaatatctcctgcactaacttctgatccgatacgaacaataccattttcatctaagtgtcttttggatctttgtgaagcattaggtatttctcttgtaagatcgtcatttccggcttttgatgatctaaattgaattgtttgttcttgaatgtgaatagaagtaaatacatcatcttttactagtttttcactgatgataattgcatcctcgtagttgtatccatatcaagttgaaaatgctactaaaacgttcttacctaaagctaattcaccttgatctgtagaaggtccatcacaaataagatcaccttttttaacttcttgacctacttctacgattggacgttgtaagattaaagtttcttggttagatttttcaaaataacgtaaatgataggtttttgtttttccttcttcatttttaatttctatttttttagaatctacataaactacttgtccgtcttcagaagctcttatgtttgtggaagaaaatttagctacatctgcttcaattcctgtagcaactaaaggagcttcagtagtaattaaaggcactgcttgacgttgcatgtttgaacccataagcgcacggttagcatcgttattttctaaaaatggtactgcacttgcagaaagtgaagtcatttgtttggaactaacagcaataaaatcaacttgctcaggttgtacagttagataagtatagtttttacgaacaataatttcaggttcaatgattttgttattatcatcaactaaagtagtagattgtgcgaaagtatatccaaattcttctgctgctgttaatcaaacaatgctttcaggatcgtagtttacaactccattttctactgggaaataaggagtttgaataaatccatatggattagttttagcataaactgcaaagtttaaaataagtccaatgttttgtccctcaggtgtttctactggacaaattcttccatagtgagtaacatgaacgtcacgaacttcaaattgtgcagtttctctgttaagacctccaggtccaagtgaagttactcttcttttgtttgccatttcacctaaaggatttatttgatccataaattgtgaaagttttgaagagttaaaaaagtttttaaattggttataaataggtttgttgttagtaatgtttttaatgttaattttttctgtatctcctctagaagaaattctttcttttgtgtttttttctagttttgataatgcaattaaaaactggttttgtaataactcaccaacatttacaacacgtttatttactagtgaatctggatcgtcgtttttacctaaattagcaagtaaattgaagtaatatgaaacaatagcaacgatgtctgaaatcaataaatgcatctcagttgatgttggatcatttccaataactagaactgatttttcttgaatttctttgtttgcatcttgttccattgcacgtttgtttggtcatacttttagagtaacaatttttgttctatcttttagattttcattttttgttatttctagctgacgaccataaacattttcgtctaatccttcaatgttggataaaggtaaaattccatgttcaaatttagattgaatatcatttgcaatttttggagtaataaaagttcctattggatacaataagtttcctttagaatcaacaacattttctgctaaataggtttgaattattctgtctgataaattcaattttctatttaacatataacgaccagtttttgataagttataacgacgttcattaaataaaagtgcaggaataaagttttttaaaccttctgttgttattctgtcatcttttctaattgttctataaatagactctaaactgtcaaattgttctttaaatttatcttttcttaatgattcaattaactctggtgaatttccaaaatactttctaataatatcttcatcaacaaaaccaattgcttttaagaaagtaattaaaggtatgtttttgtgtttatcaattcttaatttaacagtatctgttgcatttcttgtaactctgtggaaaacttcaagtcatgaacctaactgaggaataatttctactttattgaacaagtcatctgcttgtctgtttcttacattttctctgaaacaaacaccaggtgatctaattaattgagaaacaataactttttcaaatccattgattataaaagttcccccctcagtcatgtaagggatttctccaaataaaatttcttgtttttctagttcaccagattcaacttgtaatttttctagtgtagcaaacaccttgcaaacaaaggatttaccttttttctttaattctttgatgtttgtgtattcttgttctggaacttctactcttactgaaccttttttaaatctaatttctatttttccattagtggaaataataggataaatttttgtaaaggtttcttctattccttcttttaaaaatcattgaaatgattgtttttgtgaatctaaaaaatctggagtagggagactaaatttggttttagaataatctctacgtacagttgtaggtccatattgtgataatttaaattccatttattactccttgtctgttgtttttgggcttccttattgaatagtaaaaatggcacaacaacaatgccattttaaaatttgtattttgttgagaattattcaacaacaacttctgcaccaactgcagaaagtttttctttaatgtcttttgcttcgtcttcttttgcgttttctttaagaacagctggtaaattatcaactaattttttagcttccattagtcctaatcctaaaagttctttaacaactttaataacgttaactttttgtccaccatctgtttttaatgtaactttaaattctgattttgaagaagcttctgctccacctgctggtgctgcagctactgcaactgctgaagggtcaataccaaattcttctttcattacttctactaattccatcacttctttgatgttcatttcttttaatgattcaataaattgttcttttgtaatttttgccattttaatgactcctttttaaaatttttcttcttttttatagtattttaagatttatttattaattattatgcgttaattttgttctcatcaacaagcatttttagaccaactgaaagttgtctcaaaccaccaagtaatgatgaagccaacatagtaagagcttcttcgtagtttggtaaagttgcaactgtttgtatttcttttgcatcagctgcttttccttcgaaaattccaccttttagaacaacaattggatttgtttttgcaaatttggaaataattttagctggagctattgcatctgttgaaccaaaagcaaaaaagttaggacctattaaagaaggacttaaatcttcaaatcctgcttcttttgctgctattttaaacaatctgtttttatatacttttacaaaaacacctgcttctttaagttcatttcttaaagtttcaacttcagcaactgttaatccacgatactcagctataactaaggaagaagaagatttaattaagttttgaatttcttgaactaattcttcttttttctttctaaaagcgttcaaattacacctccttattagtataaaaaagtgcaatacccataaatatacattcaataactaatattaagttttattaaaaaaacagttattatctctacgtattgcgaaaagaattatactaaaaaaataaaaaatttcaattatttcatagatgttagtaaaaaatgttcaaaagcttctttttcacctaatagtcctgatttaatgtctttatcaattttagcaagtaattttattaattttttaagttttgctattcctatttttctataaaattgaactgcttttttaacctgaaatatatgaatttgaagttctttttgaatatcaaattcagtatatttatcttctttataaaggaaacagataaaagataacattaatttagaactaagttgagaaattaaaaaagaaattttttttccttgatttaatttttctttgtaaaagtttcaagtatttaaaaaatcgttatcagtaaaagcgtttataaagtttcaatcattatcagaatcatattttgtaagcaaattttctatactagaatgtgtaatttctttatcaaataacaataattttataacttctttttctattatatttgcatttagagggagttgtaaagataaagttaaaaggttagattcgttaatttttccttcattttccttgataatttgtgtcaaaaactttgttattgttttatctgttaaaacttcagttttaaaaatacttgaacttttaaaaaaatgggaataaaagaaactagaaaaaattttcttttcatctgattctacttctaattcatataaaaaaattacgttgtaagaatattttgaaattttgttagcaatctttttttgctcttggtttgttaattttgaattaataaaattgtgaaaaataaatattttttctgtttcaaaaagatctctagcttctaatgcatcaataattgaaactaaagagtcgttatcaaaaatattaataacttcaaaatctggaaatttttttaaaatttgctcaacttttttctttgtgaaatatgtatcagttccgtaaacaaaaaacatactgaaaaaattatatatgaaacaaatacagttaaaaaatttaattttattaaataaatataaaattggaactttgtaaattgatctactaatcataaaataaattgagctataaaatccagcagatttttttctcatataaatattcaaccaactgtgtatataaaaacaaaaacaggaacaaaaatgaaggaatttaagtagccaaatacattatatttattattaaacattaacaataaaacagaagcaaatgtgtgtgaaattaaacttgtgattatattttttcatcatttattgttgaattttaaatgtgaacaatataacaaaattaaagtaattaaaaaagtgaaaatataactaaaagaataaatcactaaaggatttcaaagtataaaaacaattgcaacaaaagataaaacttcaaagtttttaaaataattttttaaaatttgcttgttgattaaagaaaaaataaaaaataacgtagctcttaaaaaagaaatcggaaaatttaagagataatttacaaacaacagaaaaaataaaaacaaaaaattagagattaaaaaatttaattttataaattgaaaaattttaaatataaattttttaaaaaacaacaagtgaaaacctgaaataacaaacaaatgataaacatttaattgctttaaattagttataaatgtattttctaaaatataattctcgcctaataaacttataggaaaaacttgtgaataataagtattacctgaagtcacaaaatgaaaaaaattactttttcaatcttgatgtttttttattatcttcaacgaggttattgctttaatttcaaagaaagttttataactttttaaataattttctatattaaaatcactagaactattaacaattcgttctgcttttccatagataaaaatttgatcatttatatctaaatttttatcttttaaaaaaatatttttatcttcaaattgaaaaataactcctaacgcatttttattcgtaattgaaacttgagagtttacaacaaacgaattgatagatgcttggttcaatcaaaatcacaataaaactaaaaaagaaactaacaaacttcacaaaatttgattataactttgtataaaaaacaagaacattaaacataaaatactaaaaataaaaaaatcaaatgtgcttttgtctattgctaaaattaaaaagatttgacttaatattactactgttcaagagaaaaatttttttgtaatttctctaagctctttaagcctattccttgaatttgctcaatgttttctcaactgattttcttacttttattgttttgaaataattcttttaattttattaataactttttatttaactttaatgttttaaaagtttcttcatttaaattgtcaacaagtaaaggtttttgattttgaattactatatttatatctttaaattgtttttcttctaatttgaaagctgataaatcagatttaggaagtggttcaaattttttaaaaatatccttcaaaattgttccttttttaaaatatttttcacctggaaattttacactacctgtaattttggctttaatttcttgcgtttgtttatgaaatgtaggaatattgtaagagttattatttgtaatataaaaaccacacaaaacacaaaacaagattgtaaaaaaaatacttaaaacaatttttacttttttcttcatttttatactccttttgttttttaatttataattctatttacatcggtcaattgctgctttgtaaaaagtagaggaaagtccgcgctagcactatctgagatgatagtagtgttcatgttggatctaataaatccaagcctagacgacaagtgccacagagacgaatttattaaattaaagtgaaacgcggtaaactccatgagctagaaacccaaattaaggtaggggaatttgttttttagaaatcaataaaaaacaaaaagttttttaacttagataaataattgacactagaaatagtacagaacgcggcttatagatgtaaaaaacaccttttggtgttttttttattattttttatttttacactacatttagcttcaaaaatcaagaatttaacaaaaaaaggaaaattttatgatttttaaagtttttttatataatacgggcttaatagtgataatcaaaaaaggggaacaaattgaagaaaaaatttttattaactttttctagtttaacaacagttgctacaacaataccttttattattagttgtggtcaaaaaattcaagtagaaacttctgaaaaaattagagatgaatactttaaaacagttaaagattattcagataagttaaaggaatttcaagaaaaaattaaaacaattcgtaatactaaaccagatagtaatacagaagaaattaacaaaattatcagcgaagcacaagcttacattgatccattaattaggaaatcaaattatctttttgacaaacttcatgaattggagaaaaaagaagattctagattaagaactgtcaaaatttttcataccaacgatgaacacggtagattagtttatgatgatggaaaatacaacaattactcaggtatggataaaacaggattatatcttaaaaaattcaacagagacttgcttttatctgcaggtgatttaatccaaggccttccactctctgatactgaccaaggaaaaacaattactgaaattgctaaatattcaggttatgattctgtagctgtaggaaatcatgaatttgactatggaattcaacatattcttgaccttgataaagaagcacaaaaagaagaatttcaaagaacaatgccatttatttcagctaatatttattgaagaaaaccttcagaagctgagttaagtaaattgcctcaagaagaaaaagataaacgtccaactcaatatcaagaaggaaaaagagtttttaaaccttatataatcaaaactttatctaatggtttaaaagtagctgtatttggaatcactactcctgatactaaaattacttcacatccaaaaaattctttctgggtagaatttaaagatccagttcaagaagctaaaaaggtaattaatgaaattaaaaccgaaaatccttcaatttccttcataattgcaactactcaccttggaacaggaagaagcaaacaagaatgaacttctgagtgagtagctgaaaatactggtgaaggactagacttaattttggatggacattcacacacatatgttgaaatacataaaccaaataaagataaaaatgtttatgttacacaaacagaagcatatacaaaatgattgggtgacattgatttagtatttgatactctaacaggtgaaattgtaaaagtagttcaatccttaagagacataaaccaaattaatattgttactaaagatattccaaattacttaatttcacaactaaaaaaagaatatgacaaggaaaataaagtagttgtctttaattcaccaggtgtatttaaacatgttcaaacaatagacatagataagactccttactgaataggaagagtccaagccacaacattaggtgctatggtatctgattcacttgcttgagaatttgcaaaaaccaaagtttgagaaggaaaatcagattgagaagctgcaactcttgataactcattagcgcttgtaaatggtggaggattaagaactgatttaaaaaagggtgacattacaaaaggagacattttagggcttagtccttttggaaacagaattgtaactattagactaaaaggtgataccttaaaagaagctctttcatatggtttatctaaaggtagaagtggtggttttgctcaactttcttcaaacgtttcctatgatgttaaagtagaaaaaggattagatgctaaaactaataaacaggcttgattgtgaaaacctgaagtaaattccttcaaaatcaacgacaaacctatagaagataacaagttctactacttaagtacaaatgattttgtttctgttggtggagatggttataaaatgttaaacctaaatgaaaatgacaaaatcgaaagagcttacgaaggtggcaaatacattgaatcattaattaaatatggtcaatatgttcaaaaattagatagtaatacagcaacagacaaagaattatttgcacataaattaagtgaatacttagttgatggttacttatcaaaacaaaaagttgaaatacctgaagaagctaaagtaaaaagaggacctgtagtttaattattaatttattacttcaaaaagcacacttcgagtgtgctttttgaatttttttattgttaaatttacaaaaaaaaaaaaaagaataaaatttacttagattttggagtattatgaaaaaactaaaaagtttattattgatagctgtaattccttcattttccttcttaatttcttgtgcagaagaaaaatcaagcaagcaacttttagaagaaattgctttaaaaataaagccttttattaattctaataagaagtttgaccaaagagtattgcaaaaagtagattttgagaagaaagataataacgaagcaaccttaaacattgctttaaatcctgattttttttctattttttctgatccgagatcaaaattaaatttagaagtgagaattactggaataaaagatactcaatataaaagaaaaactgattttggagataatcaagttaattttgagtttcaaaatttagaccctactgtagactatcaagtgggccttattatgattaatgacagagttattgaattaccaacaacaaagtcagataattttacattggaaataaaagcttctgaaatgaaggcaactggagaaaataatgggaaaaatgaaggtgaaaatcctcctgataatcctccagtagacgaaacacctgataaagaaatgccacctgaaaatactaatccacaagatgatttaactgatcaagatgaacaaggtaacaaaattttaaaaccacctacagatggtgattttcaaaatcctaaaaccggtggagattttggtttaccagaaggatttacttttcctagtgtggaaaaaggaaaaaatgctgataaatatcctccttttgcttcaaagtataaagctgttgatcctcaagttttgtataaagagctttatgatagaacattttcaataaagtttggtgttactttgaacaaaggtgtgaaagtctatggttcacctgaaaacaaatttttagctactgaaaatggaactgcttggttactagattatcacaaaaaagatgccaacaactacaaactatttttcgctactaatcttcatgttgcttctcatttatcaaatactttagataaacaccttttgactaaatttaattatgaagaccctagccaagacaaagctacttcaatttctataggaaaatctgctaaagcacctcaaacttttgcaactcacaataataattatgatttttctaaagatcctaataacgtagctaaattctatgcctcagatgataattttaaaaatgcaaattttactgacttatcagccctagtaactacaaaaactaatgcttttactagtggaccgaaactcatatttgcgggttatgactttattgatagaaaatatatccaaccttttcaagaagaattgctaacaaaaatacaaaatagcctagattcttataaaaatcgtgaaggatctgatgaagaatacagtgaatataatattttgaaaaaaactttggaaacaaaagaatttatacctttatacacagattttgctgtttttgaactagatgttgatttatcaaatgctgataaaacactaaaagattggatactaaaagctatcaatgcacttgatcagtatataaagagaaataaagaaaatgagcttccaaatcaagacaaatctatttctacttatatgcaaactgttgattatattactgcttcaagaacaagtaattatcaaaatttaactaactccaaaaatgcttatatgcttggctatcctggaattgatggtggaaaatcttcactggcttgaaataatccaacagaaagaaataatgacaccgaaccagcttcttattgacgagcacctgaaaataaaaatgcttttgcaattccaggcaacgataatgaacgaaaaatgttaaattttaatttaaatccatatccaaaagtatttcacaaaacattaggtgattactatgggtatacacaaaatatcagattttcttctctatattttggggcttccggttcattagtttataatgaatttggacaaatggtaggaatttatagtcttgtgcaatcaagtggtgaaagatgagatttattaaaaagagcttcatttactccttttttactttctaaagatgttaaggacacagtaagcaataaagttattaaagcatataatttaattgatggttctgatactcaaaactcccctgctcaaacacgttcttatagacaaaacttaaaagaaatttatcctaatggttttgaaaatggtaattataaaactgctttatttcccgaaggatttaaagccattaatattcaaagataataaacaaaaaagaagcaaaaatgcttcttttttgtttatgtttgatttaatctaaagaaattatttgatcaaatttagatacaaagtttgaatcaaaatgatgtgttataaaaagaatagttaaatttttatctgaaagtaaattggaaacaattttgtcgaaattatcttggtctaaattggataatccttcatcaataattaaaatttcttttggtttatacaacgatctagcaagatgaattttctgggtttgtccagttgaaaaattatctaagtcactttcaattgttttttcaagctctaagttttgatagttgattttctctaatattggaaatatttcttcttttggttgctgttctaaaagggtgatattttctaaagttgatgcattaattaaatctgaattattgtatacataattaatatggttatttatagaatcaggatttattgtttttatatcatatttgttatttattaaaatttcacctccaaatttcttctcaatgcctaataaaatccttgaaaatgtagactttccagacccattggctccttttagtaaatattttttacccttttgaatttctaaatttaaattattaaataaaactctatcttctaatttatagtttaaatttttaatactaattaaagaaaaagtttcttctaagtcttgcaattgatattcagaattttctactttaaatacaagatcttgtttgaaagatttaatatttcttcaacttgctattaaattaggaaatgaatcaaaaagttcttctatgtcagaaaagaaagtatcaaaacatagttgtactaaagctaccaaagaaatatttgcaaatataattacttcattatctaaattcttatgagaatctcaaagagaaaatacaactattgatatagtaaataaaaaagaaaataatttgcttgtattcttatttacaaaagaaataaaatttgataacttggaatattttttctcatattttaaaagactttgatatcttatatctataacatcttctaatttattagttttatttaatacatataaagttggtaaattctttaaaaaatcacttaaagacgaattaaattctgattgttttttcaattttgtttctaataaagtacttaattttttggataaaaatgatgtatataaaaagaaaattgataatattaaaacagtaactaaacctaattttcaagaaaaggaaaatataattcctaaagttattccaataatagaaataattttgataattttgaacaattcagaataaaaattagaaataatagtttcagcactattgtttatttgcgaatagtaataaccaggtgatttttcattatagtctttgaatgttacttttagtaagaaagactggaattgcttaaaaagcttcattttatgatgaattaaaaaacctttaaaataagcagtatttattgtgtcaaaaaatcataaaatcaatgaagctaaaaagtaagatatacttcaaaacaaaagaaaaaaccaattttcgttgataatagaataaaaaataaaataaggcgaaataatactaaaaactttaaaagcaatagtaaatattacattaattcagtttcaaataataaatcaaaaatgttttggtggttggttcattgcttttcctataattaaataatttcatcaaataaatgcttaatttcttctggaatatgatggcttacgataaagactgttttatttttctgagataaaaaatctttataaatttttaaaacatcatctttatatatattatcaaatgcttcatccaaacacataatatttaagtcttggtattctaatctcgcaagtgcaattttctgtttttcaccttcagataaaacagaattatttatttctttatttaaatctgaaaattctaaaattctatatttattaaccaaaaattctaatttttctttgtctaaattcttatctcacaaacttatattattctctaaagtatcttgaaaaataacattttcgtttgtaagtaaagctatgttttttcttaaactttcatctgaaatagttttgtattctaatttgttgtttattagtatttgaccttcataattagtgattaaaccggaaattaatttcaaaagtgtggattttccttttcctgaaggtgatattattccatattttttagttgttaaaaattccaggtttaaatcttgaaaaaccttttcatcttcattgtacttaaaacttaaatttttaatggaaatgcttcttatttcttcatttaattctatttttgaagaagaatttccttcttgtgaagtaataaaaatttctaaataaggtgtaagggttttaaaaattaaagtaaaagaaaaaactgatgaaattgaaaaaataaaactggtagttaaagaaaataaactaataaaagattctcaaggaaatgttttagtatatgttagaactgataaagtaattaatgaactaaataagaaaactgaaaaaataatatccaaaaaatattgactgtaataaaactgtttaagtaattgaaattcttttgtatatttatccaaaacctgattttttaagaaggttttaaaaatttttcttttattgaaaaagtaaaatagtttgaataaactaaaaaatttgatttgtttttttgcatttaaacttaatattttttctaatttttcttgtaatttgtttaaaactgaagaaaacttcattaatataataatagaaataatcaaagcaatagcgcaatgtaaaataattattcaaatatttacttctgtcaaaaacaaaaataaaatagtaataggaatattaaaaactgatgaaaaaagaatagaataaattatttcattaattgaaaaagcaactgataaatttacattgtacttagaaatatatgaagttttgttttctaaaatataatcataagattcttttgcaattttattagttaaaaaactaatattttttcttttggtattgtataaaacattatttgttttaaaaattaatattaattcaatgataaaaaacaaaacaaaagagacagctgaaatacaaattcaagttataaattctggattttgaatttctactttgttttttataaattttattaaataagaatatgtaaataaatgaagatttaaaaaagaatacaataaaaacttaagaaaaaaaataaaaatattagatggtttatttaaattaataaaatagcgtacaatactaaaaagtttcataatttcctaaaagttttggttttataaataaatttatattaaaaaataacaattaagttattttttaatatagaagtttataagtatttatatttaattattttattttaattgtaattgaaccatcatcgtgctgtgtaattgtaatttttcttttcatattactcctttattttttacttctgcaattaatgttataacaatttaatttttcatcaataaatttctatttgaaaatttttattaaatattattactaaaaaagtaattaaatcattaattaacaattgttattttagtaaaattataaaaatataaaaaaatatgcaaaggataaagatgaaaatattaaaatcagaattcaaagttgtagaaaaattcagcacgactttaggacttaaaaatcaaacagatggatctgtacctttatataaaaaagacaaagatggttatcaagctacaaaacctgatggatactatttttatgatggtgttatttttattttagatgctaaaaaagagaatgctaaatttcaaaatcaattacttgattatatggaattagaaaaacaccaagatattataggatttcaatataatggaaaagatttaaatgtttatattagaaatggtaaaaaaggtaaatttaaacttttgcaagaagaaaaagagcttcaaaaccatacatattacaaagaaaaatactttaaaaattctaaagaaaataacgaagaactaataaatcaatttgcaaaacaactagcaaacgcttttagagaagctaaaattgataaacaaatgactgttccatttatcggtatagttatgttagcttacaaatatagcaatacaaaaaacagcattgagtttaacagaaattctacttctgctttattagatagcattaaaaaagcttctattgatcaaattcctgattcagataataatactaatttaaaatctaagcttcaaaacttacaaaattatttatacaatagcacatttaaaactgttgatatttttgagttaaataatattgttgaacttatttcaaatgtttataaccttataaatattagtcataaaaattataaaggtcatgacataatgaatgcttttttaaaagtgtttagaaaatgaaactcggcagatgcaaaagaaaaaggtgaagtatttactcctgatcatatcgcgcagttgatgtatgatttaatacaagtagatgctttaaatgatgttgttttagatcctacatgtggatctggtacatttttaactaatgcaatggcgaatatgtttcaagatgtttattctttttttaaaaataaaaaattaagcaaagaaaaagaagaacaatattgtaatcaagcatgtaaagatattaaaagtaataaattaataggtatagaattaaacgaatttaatgctactttagctgagattaacatgcttttacatggagatggaagtagtaatataattcaaaaagattgttttaaagaattacctcttttaaaagataaatattctaaagttttaatgaatcccccttttagtcaaaaagaatcagaacttaaatttgtttatgcaactcttgaaaatttaaaagaaaaagggaaaattgctgctattgtacctaaatcttctttaaatggaagagttaaagaaaatgtagaatatttaaaaaagatttttaggatggctaaggtaagtcatataatttctttaccaagagatgtatttcaacctaatgcaggagtaaatacttcaattattgttctagaaaaatatagccaagaaacgatcaagaaaattcaagaattagcttcaaaaaagaaggaaattgaagaagatacacaaaatattttcttaatagattttagtgatgatggttttatttatgctaacgaaagaagatataaaactgataaatttgcttcaaaaatgaaggaattacaaaaaattttaaaaggacaattttctcctttacaggctttaaaacataatttaagatttgatgaagaactttcttttgaaagatttaatactaatagaacttttgatattgatgaatctgtttttaaaaaatatatgaaagaaaactttgcaagtaaagtactctctggaatagaaaatcaagtcattttaaagaaaaaacatttatctaagtacgaaaatataaaatttaaattttttgctgttgatgaaattttagattttatttctaaaggaaaacaaaagcaatctatagatagaaaattagaaaataaatttgaaaaagggataccaattataattgctaaaaaagataacaatggagttggtggtttactagaaaatcatttagtagaagaagtttttcaagataaattctgtattattaatggaggtgatggtggcggaggtaaaacttattattgtgattttaaatttggtgctacctcttttgtaaatatttgtgatttaaaagaaaaatataaaaatatttttaatcaatttcctttatctaaattctatttagccatcgttattagtgaaagattattcaaatctatagggcatggaagaacacaaaaaaatcaaattccttctgttaaaatcaaattaccaatagatcagaataatcaaatttatgctgaatacatgaatgactttatttctaatttagatttaaaaaatgaactttactatgaataaatttgtaatatattaatcttaatttttcttagtttatatttatgaagaaactaaaaaagtgaaatttattgaatttcacttttttagtgtctaaattattttagtttgaacgaataactataataatagcaacgataattgtttcttgcatttgacacctccattctgttatttttgttattatgtatcaagatttataatttcattgaataaattaatatattttttctccaaatggtgtgtgatcagtattagtgttaggttcttattttgtagtaaattcaataaaattttatcgaaattttcgttatctaaattagataatccttcatcaataattaaaatttcttttgattcatataatgatctggcaagatgaattttttgaatttgtccggttgaaaaattttcagtacttgtgttaatttctttatctacatctaattcttcaaaattaacatcttttaatattttatctatattggtttctttttcactatctaatagtgtaatgttttctaacacagtagcatcaaaaagatttgcattattatatacataattaatatgttgatttaaagatgtggcaacaagatgctttatatcaaatttattatttataacaatatttccttcaaatttcttctcaattcctaacaaaattcttgctaatgttgattttcctgaaccatttgaaccttgaattatgtatttatttcctgctacaatgttaaaagataaattattaaataaagttctatcaggaagtttaaagtttaatttttcaatagaaattgagaaaattttttcttctaatgtttctagactttcttgtatgttatcaacttgaaatttattattatttttaaataactttatattttttcaacctgaaatcatagatggataattgtctaataattctttggaggctgaaaaaaattgactaaaagataactgaactaatataattaatgaaatatttgtaattatcatctcgttatctttattactgataaaataaaatgaccaaactgctattccaattgaaataattgtggaaaaaaattgactagaatattcattaaaaactgaaattaaatctgaaaataaactaaatctttttctggtgagtcaattttgtttgtttttttctttgattataaattcaaatttatcatctgaattcagtgtttttaaagtaggtaaagtcagaagatatgtacttaaagaattattgaaattagaaattgcttgcaattgtgttgtttgaagttttgtcaatttttttgataacaataaagcaatgaaaaggaagaaaataataaccgctaaaacaaccaaagctaatatataattaattcaaaagaagactcctaaagtcactaaaattgttgataatgttttgaaaaaagataataaatttgaaaaaaattgagaaacactttgctcaattgtgttttctatttctgaataataataaccactagaatttttattatattgtttatactgtgcttttatcaaaaaatttgttatggttttgataagtttcattttatgaaatattaaaaaacctttaaaataagcactattcataaagctcaaaaatgttgttactattttcgtcaaaaagaaaagaattatgattattcaaaataatattaaattttcattttgaattgaataaaaaatgaaatagggtgaaacaattacaaaaaaattaaaaataactgaaataattaaatatagtcaatttcaaaaaataaaaaaattatgttttattgaatatttcatattttccttatatttctattatctgatcaaacaatggttttatttcttcagaaatatggtgacttgcaacaaaaattgttttatcaggtctagagagtatgtctttataaatttctattgcatcttctttaaaaatgttatcaagcgcttcatctaagcatcaaatatttaaatttttgtactctaatctagctaaattaactttttgtttttcaccttccgataaattggctggactaatatttgcatctatttttgaaaattgatttattttatacttgtttaataaaaaatttactctatctaaatctggcttggtgtctcataaagttatgttattaagcaaagaatcttcaaaaatcacattttcgtttgtaactaaagctatatttttacttatttctttaggatttacgtttttatattcaatagaattatttattaaaatttctccttcgtaattagataataaacctgaaattagcttcaaaaataaagactttccttttcctgaaggagaaattattgcatatttttggtttttttcaaaagtaagatttaaatttgaaaaaataggagtttcttggttataactaaagctaagattcttaaaatcaattttaaaaatattttcttttaaagtaatttttttagaattatcatcatttgttttttcaaaaataacatttatatatggatttaaagctttttcagttaataaaaaagaatataaacttgccacaccagataataaggacatgtttaacataaatagcgaaataaattgtgaaatatcaaaagttttattatatgtaagtacacctaaagttatgaaattactgtaaacaaaaaaagaaaaaacaacgtttagtaaaaatgatttaaattgaaatgatttaaataaatcatattcttgtgtatatttttgtaacaattgagattttaaatattttgtaaaaatatttcttttgttgaaaaaataaaataaattaattaaaccaaataacttaatttctttgctggtatattcttgtaaaagtagttggattttgccttgtattttatgaagtagcggggaatacttgaataataaaaatccactaataatagaaccaactacacaatgtaatattaaaattcaagattgtacatttaacgaaaacataaatatagtggggaaaattattgaaattattccagggaataaatataaataaatggtgcttgttaatgaattagcaaacattaaatttaaattgtaataagacatatatgtttctttatttttgactaattcttgatatggtttttgtataataattttagaaactctatcagtatttttttgataaataataaaagttgttttattgctttgaaaagtataaagtaatttaaaaacaacaaagaaaacaaaggaaaaacaagtgattaaaattcataaaataaaatttgaattatcagatttgttttggtaattaataaaatctataatataagagtaagaaaaaatatgcaaatttaaacataccatataaattgttttgattataaaaaccaaaaaattatttttcctgtcttgatttagaatatccaatgtgctcttaaatgttttcataatttttatgaattataataaaaaattaaaaaattttatttaaaaaaaagagaattttgtcaattcaaatcaaaaaatatttttttaaaaatatgtaaaaatatagtaaaaagttctgagcagatccccttttcttagaaaaatagaaaaggggatctgctcaataaagtatttgattttaaatttactataaaaaagaaagaatttttagtagaaacaaacttttttaattctacaggttcaaagtttaactctgaaattgaaagatttaaaattttagctacagaaagtcataaaaataattttgaatttatttgaatagcagatggaaagggcttaaaaacacagaaagaaaaattaaaaggttttttttgaaaaatataagttatttaatttgtatacatttgaagactttttaaaatcaaaagctataaaatagttgttaaaaatcaatattttgttaaaattattgcataacagatatttactgattcctatgtgggttttaagcgtaatattaagtgcgccaacttatctgggctcctttgttttgaaggagttttttattacttttgcttgttttttttgttctaatttagacatgaaaaaagaaacagaaaaaatatttatttatttggatgaatcttctacaattgagctgtatgataaggaatctcaagaaaatgtatttatttatggaggtttttattgtttgagtgaagaaaattgcaaagacattttaaataaagctacttcaaacaaaacttgaataaaaacaaagcaaaaaggaaaagaaataaaaggtagagcattgcatttaaaaataaaaaaagagttaattacttttaaaaatgcaataggtgttattgcttttcttaaaattttatataagcaatttgttagctcaaacggtaaaaattattttaaattttttatgataagttatttgataaatgctgttattgcaaaattaatatcaaaaaaaataattcaggaacctatacaaatacatctatatttaggtcaaaataaagaagtggaaaaagaagataattgaaaagaaacattaaaatcaaaaattttgggaggattagaacttcaaaaaacaaattatttaactggtgaagtgaaaaaaccacgcactcttagttatacacctgatatttttattaaaagtttagattcaaaaactgaagaaaagctccaattagcagatgttattgcaaatacattatatcaatcttataatgtcgcgaatctttcatgaatgaatttttgttatactaacttttttaatattcaatttataggcgatgagttagatgttggcaaacttaagaaacttcaaggacttattcatactgagtttttcggacaattttgaagtgttattgagtgttcagataatcaaaaagagtagatagcttctactcttttttgtttaaccctaattctgcgtcagtagtaatttttaaattagaaccaacataagagaaaatttcaggactctgatttatatactcaccgttaatgattctgattaccgaatctactgtttcttctaaaggaacaaaaactcctttttcctttgtaaagtgttcagtcatgaagaagttttgtgagaaaaagttttcaagttgtaaagctttttaacaataattttgctttctttatcaagctcatcaaatcctaaaattagaataacgtcttctaattccttgtattttgcaaggatttttagcttcaattattgctttaaaatgtttttaccaataattttttcatttactgaatttgaagaagaagctagaggatcaaaggtaggaaaaatatttttagaactttgttctcttgataaaactaatttaccatctaggtgattaaaaaccgcaactgctgatggatctgataaatcatccattggtaagaaaattgtttgaaaagaagtaattgcaccgttttgatttttaaaaagtctttcttgaactgaagcaacatcggaatctagtgttgactgataacctccaactgaaggtttttacctagtgaagcggaaacctcattttcggcttgaacaaaacggtaaatgttgtcaataaagagtaaaacgtcttctttttcatagtctcttagatactcagccgctgtaactccgattggaacaatcgacattctagcccctggtgattcgttcatttttgaaatatacattgctgaatttttcattaagtttgaagactctaattcattaaataattcaatagcttctcttgaacgctctcctgatccaataaaaatattagaaattgattttttgtctttgttaacattaaaaattatttccttcattaaaacggtttttccaacaccggcaccaccaaaaataccaagtttaaatcctttaacaataggaataaaaaagtcaattgctttaattccagtttgaattatttcagtttgcacactaaaaaatcttgatttatttattgttgaatttacttcaacatataaaggaaaacttgcatttctgttaggtaataaaggcttaccttcaaagctatagatgttgttttttgagtttttaccaactggtaccataaagcttctttttgtgttagtaacaacatcatttacctttatttctgaagctaaataaataattattgctctaattgttgtttcatttacaagtctttttacaagtaaaaatgttgtattattatgcaaagttaagatttgatttaatgaaggtaaatcagctttatcaaattttacttcaactacatcagttcaaaatttagttatctttccaagcattatttatctcctaattttttagctatttgttctaattgtgttttatttaaaggcacaaattcatgattgatttcaatttttcagttgtagttgaacaattttgaatactctaataaagcaaaaccaaaaaagtcttttacaagttcatcatcgtatggttcgttatttaaaatttgtgtaaaagattttttagcatcatcgttaatttggataaaggcgtcgataaactccatagctttttgttcttctttaacgtgtcttaaaattcctcacataattattttagacatcagcaacacaaagctttgtgaatataaagaaaaacctttttgattgaacattttttcaaccatttttcctttatataacaagctagatgtttctttatttagttcataatcaagcattgcaagcttaagatgtcttttgtatgatttgtagatttttccaacttctgaagctacttttgttatagttctgctttgaacttgtgaaccagttcttgatactgaaaagtcaatgtcaatagcaggtaatttcccactagcaaataaatctgaacttgttacaatttgaccatcagttattgaaataacatttgaagctattaaacctgtaatatctccatcaactgttttaataataggtaaagctgtaatggttttcttgttaacaaagcttcctgctctttctaataaagaagaatgggcgaaaaacatatcccctggcattgcttcttttcctactggtttgtctgttaataaagcaatttctctaaaaatatttgcgtgtttagttagatcatcaaaaataattagaacatcgtgattaaaagagagattttcagcatgcgccatacccacataaggagctaaatattgttgatatgcgcttgttgcaggagagtcaataatgattgtgtttgaaaaggcttgatgttcttttagtgtttcataaattcaagaaagttcttcttttttctgtccaattgaaacataaatacacttagttcctgtttttgcagcgtttattattgtgttaattgcaatatgagttttacctgtttggcgatctccaataattaactctctttgcccttttccgataggaataagaagatcaataggaataattccggtataaagttgagtatttaaagttttaacagtcattaatttatgtgcatcaccaaaaattttggatcttactgttctgtcttgaacaattgtttctgctcttggaaaaattgcatttccttctatatttataatttttccaaacatagataaagaacttccaacatcacttttgatatcaagttcttttagttcgtcgttgattttaagtttatttaaatctgtgctatcagctaataaaaatgctttattttctgtagcagaaattaaaatcatcttgacatttggtttgtctacaactgtaaaaaattgtctttgtttataaggataaaatcctgaaacttctatgatgtaatcaaatattgcagtaattttagggtttgtcattttatattaatcctcctgtgaatcctaaagctataagtaaaactcctagtgctaaaatggctactgaaaaaattataagaatcaccattgatttagaaatagttttgttttttgtaaatttgttaaaaaacttgaaaaatgaagcaaaaccaagagaaataaagccaagtagcgacattaaaattcctattatgtacattgaaggagattttgttttttgtgcctctttcattatttggtaataatcttcaacttgggttttaaaattttttgtgtcttgatcttcatcatttatattagaagattctttattttctgaaggattttgatcagtttgatttgttttttcatccgcttgtagttgcgcttctgtagaagatggtgttgcatacttagaagcgttgctatcgattgttgttagttttgtaaaaatatcatattctttagtaattttttctaataaatttgaaaaaccattaaatcaattgatatagttaaaagttttttgagaagcaaaattattagctataaaaacgtctttttgaattttaataaataaattttctaatatagaaatattttggtgataataataaaattttttctttatatcttcaaaacgttctttagatttagtagcaaattgtgtaaaaagtaattcattatagaaacctaaagatgtttgggaagatttatttgccaaagtaagcaactgaaacaaatgaacaggtgtttgattagaattttttaattggacttgttgattctttaaagcactaatcaaataatttaaaagttgattaacaggtgtttgtaaagaagaatctgaatcgaaatctgtgtttttataattttctaaaatttgattttgtttttccaaaaacttaacttctttattatctacctctaatgatgtgttttctttattactaatttgttcgtcattaattattttagttgcaatatccaaaagtacatatatagaattctgaaatactggtgaattttttagtttatcataatccatattttcaccaatacctactgagttataaaactttttaaataattgatttgcagataaaacgtactgttctaaaagtttttgtgtgctctcagttttgttagcttgttcattattgttggtagattttgtatagtttctagttatatttggatgtaaattatcttttaattggactgtaaaaacaaattcacctgttgcttgtccacgttctaatttagttactatatatctatgtcttgtattgattggattattaaagaaaaaatatttatctgatactttttcaatctcaacaccttctctatttgcttcatttgtgaaggatttttgtatatcttctaaaggtagaccaataaattgacttttaatttcaggcaataaatctggcactttggttgataattctaaaggattaactggagttggtttaggaggtaaacctggttcactttcgccattaacgggcggagctattgggcctaaagaaggaggagtattttcttgtggtggttgttgttcttcttctttttgttggtttttattttgttctaggtcaaattttgtatatctttttttaagtatagattttaaataatcgtctcaagaagtaaaatcttttggtggttttagtgtaaatccattgtcttgtgtagattgtaaagtttttaaatcttcttttgacattggaggaatatcttcatcagaatcgtataaaaatgaagcaaatttatttaataaattatttttataatcatctacgttttgagtaaattcttcttttgaaactgtattatcttgttgattttcttctattttaatgtcttcttttttatcaactaaattatcgtagtttgtctctgagtttgttccgaaaatgatgtttgaaaaatcttctccatcataagttatggtaccacgattattttttctgtttttagataaagcttttaaaaatactgcattgattccaaattgttcaggattactaattatttgatcagtgtttgtttgtaaaaagtgaataattcttgcaaaataatgaagttttctaaatctttcttcaaaagaaattgattgatcttgtgagattttgttgatttcagagtttaatttatctacagttgacgaaatagctgctctaagtgcttgtttaaattcagtagaagctatattatcgaaagtatcaaaaacaggtgaaacaaccttaggtggctgtggttgtggagcaggaggagtactaggttctggatcagcacttaaaattgttaaagttggggttatgcttatcaaagataaactaaaaattgataaagttttttttatttttttattcactctgcatctccttcaaatttaataaatcacttaatgagtaaacgtataattgatctttgaaattttctaatttaatataatcatttatttcaacacctattttttgcatagattcaagataaagaatttctttttttagttctttaatttggtttttgtaattgagttttttattagaagaattttgaaacactcttttttcatttaaagaattaataactacttctttttcctttatcaaaatgctactattcttcaaaaagaagtattttatagaattatcaactaaatcatttacttttattaatatccttttatatgcaccgattgtatgtaaactaacttgaaatcagtcatcagattcgtctatattaataaaaatttttgcctttcgagtttcaaaactttgatgatttaaaaattgaatttcaagaccaaagtcttcatttttcttcattattgctctcctttttcgaacacgctatgagtaaaattattttttgtcaataaaactatttcttcaatttcattttctcttttaagtttaattatttttttagaaatctttgttatggattcatctaaatctttaattattttatttacttttactaaactatttttagacgcataaaaagaagattcatgaattaaagattgaacacaattttgtaaataaatttcaatctgtgcttctataaaagagtcaatatctggaataatagaatatttttctagttgaggtaaaggagttttttgttcgtaatttaatagtttatcaatatcaaaattttcaataggtaaaattgtaaaaatatcgtttgtgtttttattagaattaataacaaaacgtacttgcttatagttttctttgatgtataaaagcttcacaattgaagctaaatgggtagaaaaattaggttgggaaatatcaaaatgcttgattacaaataaattatttttgttacaaaaaagatttgctttgtcacctatagttataaaatcaatttgagttttcttggaattttttaatattatttcttcgtatctagaataactatctgttgtatatttttgttcttcttttaaataaattcaaagttctttgttgggaattagtttttgttcaattttgtttaaaaatttgtttttaaataaaactgattttgttacaaattcgttttgaatattaaactttttagttaaatttattattgcaaacttatttaaaagaacattatccaaataaaaattcaaaatattacttaatttgataatagaaataagtaaaatatttttttcactatttacttttagatggattttctttagattatctcttttttgtataactttttttaagtgcatatttttacctttttaatattgaaataaagtctttactaaaaagagttcttaaagtacttgtatttgaactagaagatctaaaaattaataagcctggtaaaagttctaaaattttattttctaataaatattgattaacttgattatttaaaaaagtataaaatctttgttctactaaatttgtcgaagttacaaaattttctactaaattattagaatttcctttatgaattaatataggaactaataaattttgtgagtattttagatctaaattaaatgaaattgcaaaattagcgaaatcaagatttgtcttcttttttaaagcattttgatattttttttcaaagtttttataaacttctgaagaaaaacctgcactaatttttaataacacagaagaatacaattgattaaaagaaataaagttattatcttctctttttagttggtattctttgtataaatcaaatacttctatttttgttttatcatcaaaaactagaaattctttttcttcaatttttgttaattttggttgttcttttttctttgtaaaactaagaaaagaagagaaatattcctttatatttttattcatgttctgctcctttatttatatttttcttggtaatgcttattttaaataatgctcttacaatatctacaattgagtaaattaatagggctaaaaacaaactaatttcagttatagaaatgatttctacaactgttaaactattttttgtacttaatacaactgtagaaaaattattggctgaagttaatagaatttctcaaccttgaaatgttattaataaaagagctaaaagtaaatgagttgataaaaacaacatagaagttaaaaaagttcttttgtttttgaaaaggaaaactgtagtaataattcaagaaaatataaaacttataaagaaaattattcttgtacttaaaatatttaaaaccgtaatggatgaaaataagaaaatggaaaatataagtatttgaaagattacaaaaagtagtaaattataattttttccttgtaatttaatttttggatataaatttaaaaataaatacaaagccaaaattatagttaagaaaattataaaagtaattaaagtaccataatttatagtattaatatctaatgcactgtagtttccgaattgaattagaataataaagtatcacaataatacacttgctagtaaagtaaaaagtaattgaatctgatttttaaaatatgtaaagttgtattcacctgaaaatataaagaaaatttttattaaattagaaccaaaaaataaaattgtaataagtaatatggaaaaaataattacaaaaatatttgctgtgttatcacctaaaaataggtttttaacatatgaatagacttcattttctgaagcaacataaacttcaaaaccttgctgacttgtttttgttttagttataaaataagtgaaaattataaacaaaattaggaatataaattgtgaaacaatattaataattaaaacacttattttgttaaatcttaaggtttctgtttttcttttaaagtaaaataaaaacaaatgatatgatgaatttattataaataaaggtactaacaataaagaaataaaaaatattgaagaagaattattaatttcaagattgttgttttttagtatatctgaataaacaggattatagaaaattaacaaaaagaaacttattaaactaatacatatgtataaaccaaaaaataacgagtattttttaattaattctctttggaaaaatatattgaaaaaattcttaaccaaaggaaataaaatacaaaatcctaatatcaaaaaccttcaaatattaagaaaatttagagaaacgtttatttcggtgtcataaagtcaaacactggataaataatctttgcttactccaaaaaaagtttgtggagataacaacaacgaagtaaaaacaagtataaatattaaaattaaacttgtaaatttaaaaattaaatttatcttgctatctctgtttttaacaatttcaatatcatcataaagttttttatcgtttatgttcgactgagacttattcttgtgaatgcttatcattttttcttccttttagaaggttatttagcttttgttggtactgtatttgtaaatttaaaatcttgtggaacatcttttactccatttggaaataaagcagttttaaaactatctccgtaaagagtttttaaagcttctctatatgatgttttttggtcagcaccaccaccgtagattaaatcatattgaggtgaattgtattttccatatagacctttgtaatcaaatccttcggatctaaaagctgcaaccaatcctgttttagcagtttcattagctgagaagaaaactccaatcaattcattgttttgatttctaacagatgaaccagaagctcctccaactggtgcgtaatgacgaggaatgtattctaatcctgtagctatatattttttagtattatcatcttcaactgtagactctttttctacttctttttttgatccgtctgcttgttgttcttcaattttaaatttaacttgttttgaaacggtaggatttgacattattgtagaagtatgaagagattttcctattttaggtgcagcaataaaagcgtcggtgagtcctggtttatcaccaaaacttctatacccgatgtttaaagataaataatttcctctgtttgctctttcattgtttgagttgggattaccttcatcattagataaagaattataaaaactagcatctgagttcattcaaagagaatatccaagttttttgttatcaaaatcatcttgatcttcatattgttttaagaaaaagtcaccagtagattgtggataaccaacaataaatatttgatctgaaggagtttgttttgtatctgcacttgaaagtttggcatctattttagaataatcagttaaataggatttttttaggaacttgatgtgttgttcttgtttatgataataatcatttgttagtgttttaatgaattcatttaaattgttgaatttttcaggaactttgaattttgtaaaatcaatttctaaaaccgcaaaatctaaatactcttctgtgtctttataaagaggattgtttttatctttatctactaaataatctgtaggttttgtttttaaaaaatctgttgctctatagacaattctaatacctggaattccgtaattatcaggtgaaatataatctgctttttgagtattattttgtacttcatctgggttttttaaatcattttttgtaaatgaaaatgttaagtactgagaatctggtctatcagcacgaaatgttgttcttaatttagttcttatcccaatttcaggttttaaaactgtaagagaaacttgagtagcgttatgtttatattcttctacaacgtgattgttagtaccaaaatatcatttagttggttgttgatttcgatctgaaggttgttcataatctaaaattcacattgtacctctagctgtagattcagtaggtttataatctttgttgtttttgttttctagattttgaaaatatgctcgttgttcttctggtgaatttagttcttcaaatttagctgggcgtccaaattttactgaataagtttgtaaagcgatgtctttatatttttggttcggaatatacctagctaatccatttacttgattttcatttctactaataacatctcatcaagcaggaccttttggaatttctgctggatcatagagtttaagtccttttacttgtccaccttcataaacaggcatagtaaaacctttaattaaagcatcatcatatgtatctaattttagttgtttagcagtttgattatacttttctttatctgaatctgttcttgtaatatcacttcttcaagaagctaaatcaaaaggatttttcttctctatagaagctaattgaggtttaagtaagtttaaatatttttctgagtctgcttcaaatctaccatagttatcttttgaataataagtactttgatcaggcattaatttctcagctcaacctaagttaattacgctatctctataaggtctaaaacctgagatttcaacatctctttctacagaatttgaaggattttctttttcacttattttaattgttaaaattatttttccttgttctgcagaaacgcttggattattatcaatgtattttttatttattacttctatatttactgcagaatcatcttgttgattttgaggtttaactataatttgagaaaaatcttccccaatatcgttagttgtgaacctagaatagtcactatttccatttagttctgccaaggaaacaggaacttgttttaatttatctgcagtaataagtaatttttgattttgaggaccaaaaaatgttgctggaggttgcgttgtattatcagaagctcctgcgcctgctccaggttttgttggatctgaaggtgattttggatctttagttggaggttttggtttatcctcagtttgtgtacatgatattaaaattgtaggtaaaataaatatagttgaagaagctaatgtttttagtaaaaaaaatgtattttttcttgattttttcatatttttttccttattcatatgtaattcctgtatctacttgaacattaaatcctaaatttcttaatgattgttgaagttgagtatctgatgagttaaccaagattttttgacctggttgaaacaacctactatctccaattttttgttttgcatattttaataaaatatttaaattattagctcctgtagaatttagagcttgcactttgctatttgcaaccactttaatatttctagttgctgaatcatttgcaaaaaagatttttggttttggttgagcaaaaggattagaagtatctaacacatcaaaatgtgcttcatttaattcttctgctgtgatttcgaaagtatttgaattgttgtaaagtcctattctatttaaacgtcttggcttggaatttgaaggttttttctcatcatagaaaattaaacctcttaaggatttagtttttgtaactctagttaaatcaagaccagttggatatgaattttctgattctttagtatctggatttaaacctggtcccatatgaccttgaaagactttttcattatttcttgttcaataagccatacgtaaaccgtcattaattcttttgtaattcccatcacctttataatctgaatcatcaaaagctaaagaattaaaagatactatagtagcaacttttgcacctttagcataatcagagcttacgttgtagtcgttagtattatatcaagcaacattttttaaagctcaaggattaattgatcaatcttcagccaaagaattaccttgtgtataaatagaaagttcatcaatttctttatcttctaaagcagataagaaggaagtgttgtggttagttccttcaataaagagttctagttgtggaagtttgttaggtaaagctaacaaaatatctttaaatttttgatttccatctgtagctcccatatttaaaaatctatatgaagtaatttcttttttatctctaataagatcttcaatgaactttttagtttttgaatatccagtattatttttcatatctatagtaacaacaattccttcatttctaacagtttcgtcgttattaccaagatcttttcttagttttgctactgtaattccattagtttttgaagctccatattgagagtattgagtagtaatatctgtttttgttcaaccagggtatttaccacttagaatatcaccaccaggtcttcagtaatatgagttatatccaaaagctctttttttcaagttatctcttgtatataaagctgtagttttgtttgtaattggagatcaagaatgagattctaaagttccatcggctctaagttgaatattagcattatcgggttcaatggttagacctttttctaaatacttttgtgtttcttcatcaactttggagaatttggaataatcaatgtaataaattaatttagcatacttaacgtttttagcatcttctatgtgttgttttgcttctattcttttatcttctgctgcattataaagtttttgtcattcttgaagttttgctttgttaacatctgaaaatacctcgcgacctcttgcatcaaaaccttctgcttttggtctttgagctaataattgtttacttattttttctgcctgttttagttcttcttgtgctttttttaaatcagattcatatttagctttaatgcttggatataaattctgtccttctggttttaaaaaaggaacaactgcatctccgttatcaaaaagttctcttcacttgaaaaatgcatttttatagtaattttctcagttttgttttactattgcggcaactgcgacatcaccttgtttgatatcgctttcgtaaatgttaaaagcaccaccttggaaagaatttcttaaagcagttcgtgtattttctacgttttttcttttaatatcatctgttacttgaatttgtttaatttcatcaataatttctgatcgataaggtactctatttgctaaatgattttctttatcatatgcatcatagtctctgactggagcttttgttactagagcagtaatgtcaataccgtgtcaagtatattgttttactgcttcattttcttgaggaacaaaaggtttaggaggggtaggttttacttctggttgtggaaccggttttacttctggctgttgctgttcaataattactggtgcttcaatttgttcttcaattggtttttctggttcaacaattttgtcgataggctttggcactatgacttctggtagcttgtcaataggtttaggttgttcaattttttgagcttcaacaatcggaggttttggttttggtaaaactacagtctccactggtttttgtatttgttcttttaaatttttatcctctaaagattgataaggatcttctaaattagggttttttatcggagttaaactattattagtaggtctaggagttggttcatatatataaaataatgaacctgtttctgttccttgtgtcactgcataagacaccacacctacagaaatagaagctgtggcgaatactaaaaatgaagaaaatatttttttattttttggttttaaaattaatttcataaacactccctttatactttaattttacttttttttattgatcttatttaatcttatggtgaatttataagaacgttttttttgaaattgaaggaaaaaattgtattttttaaccaaactattcattttctctagctttagtttatttgttcatttaataagcctaaaaacagtggactgcttctactcttttttatttaaccctaattctgcgtcggtaggaatttttaaattagaaccaacataagagaaaatttcaggactctgatttatatactcaccgttaatgattctgattaccgaatctactgtttcttctaaaggaacaaaaactcctttttcctttgtaaagtgttcagtcatgaagaagttttgtgagaaaaagttttcaagttgtaaagcttttttaacaataattttgctttctttatcaagctcatcaaatcctaaaattagaataacgtcttctaattccttgtattttgcaaggatttttttagcttcaattattgctttaaaatgttttttaccaataattttttcatttactgaatttgaagaagaagctagaggatcgaaagcaggaaagatatttttagaactttgctctcttgataaaactaatttaccatctaggtgattaaagaccgcaactgctgatggatctgataaatcatccattggtaagaaaattgtttgaaaagaagtaattgcaccgttttgatttttaaaaagtctttcttgaactgaagcaacatcggaatctagtgttgactgataacctccaactgaaggttttttacctagtgaagcggaaacctcattttcagcttgaacaaaacggtaaatgttgtcgataaagagtaaaacatcttctttttcatagtctcttagatactcagccgctgtaactccgattggaactatcgacattctagctcctggtgattcgttcatttttgaaatatacattgctgaatttttcattaagtttgaagattctaattcattaaataattcaatagcttctcttgaacgctctcctgatccaataaaaatattagaaatagattttttgtctttgttaacattaaaaattatttccttcattagaacagtttttccaactccggcaccaccaaaaataccaagtttaaaacctttaacaataggaataaaaaagtcgatggctttaattccagtttgaattatttcagtttgtacactaaaaaatcttgatttatttattgttgaatttacttctacatataaaggaaaacttgcatttctgttaggcaataaaggtttgccttcaaagctgtagatgttgttttttgagtttttaccaactggtaccataaagcttctttttgtattagtaacaacatcatttacctttatttctgaagctaaataaataattattgctctaatcgttgtttcatttacaagtctttttacaagtaaaaatgttgtattattatgcaaagttaagatttgatttaatgaaggtaaatcagctttatcaaattttacttcaactacatcagttcaaaatttagttatctttcctaacattatttatctcctaattttttagctatttgttctaattgtgttttatttaaaggcacaaattcgtgattgatttcaatttttcagttgtagttgaacagttttgaatactctaataaagcaaaaccaaaaaagtcttttacaagttcatcgtcgtatggctcattatttaaaatttgtgtaaaagattttttagcatcatcgttaatttggataaaggcgtcgataaattccatagctttttgttcttctttaacgtgtcttaaaattcctcacataattattttagacattaacaacacaaagctttgtgaatataaagaaaatcctttttgattgaacattttttcaaccatttttcctttatataacaagctagatgtttctttatttagttcataatcaagcattgcgagcttaagatgtcttttgtaagatttgtagatttttccaacttctgaagctacttttgttatagttctgctttgaacttgcgaaccagttctagatactgaaaagtcaatgtcaatagcaggtaatttcccgctagcgaataaatcagagcttgttacgatttgaccatcagttattgaaataacatttgaagcaattagacctgtaatgtctccatcgactgttttaataataggtaaagctgtaatggttttcttgtttacaaagcttcctgctctttctaataaagaagaatgggcaaaaaacatatctcctggcattgcttcttttcctacaggtttgtctgttaataaagcaatttctctaaaaatatttgcgtgtttacttaaatcatcaaaaataattagaacatcgtgattataagaaagattttcagcgtgagccatacccacataaggagctaaatattgttgatatgcgcttgttgcaggagagtcaataatgattgtgtttgaaagggcttgatgttcttttagtgtttcataaattcaagaaagttcttcttttttctgtccaattgaaacataaatacacttagttcctgtttttgcagcgtttattattgtgttaattgcaatatgagttttacctgtttggcgatctccaataatcaactctctttgtccttttccgataggaataagaaggtcaataggaataattccggtataaagttgagtatttaaagttttaacggtcattaacttatgtgcatcaccaaaaattttggatctaactgttctatcttgaacaatggtttctgctcttggaaaaattgcattaccttctatatttataatttttccaaacatagataaagaacttccaacatcacttttgatatctaattcttttagttcgtcgttgattttaagtttatttaaatcagtgctatcagctaataaaaatgctttattttctgtagcagaaattaaaatcatcttgacatttggtttgtttacaactgtaaaaaattgtctttgtttataaggataaaatcctgaaacttctatgatgtaatcaaatattgcagtaattttagggtttgtcattttatattaatcctcctgtgaatcctaaagctataagtgctattgctaaaatcaagattatagtcgcaaatataatgagcatagtcattgatttagatatggttttgtgttttaaaaacttgttgaaaaatctgaaaaatgaagcaaaaccaagacttattaaacttaaaaatgccattatgatcccgcttgtatacattaatggatttttttctttttcttcatctcgcattatggttttgtattcttcaatttgtaaagcaaaattttgagttgcttgttcttctggacttaattgttcttggttttgaccagttgtctgatttgtggttggatttgttgtttctgtattattagactcggaagttgtttcatctgcctgttgtgaaataggttgttcatttgtgttctcagttgaattatttggttggttatcggaaggcggaagtgagtcttgattttcttcattttttaagtattttgaagcatttgcatcattagttgttaatttttgtcaaagactaaactctttgctgattatgcctattaagtttgtgaatttttcaaatcaatttatataattaaatgttttttgactagctaatgctttagctaaaaacacatctttttttgttttattatatagtttttcaattatcgaaacatcttggttataaaactcgaatttactttttattgaatcaagagcaaacttattttgtggattttgaagtcttttttgtatagaaattaaagcattgtcataaccaaaagttgattcttcaatagttgctgtaattaattgaaataacgctactcttacttgatttctaatagtggcttctgagttttttaaagtgctaagaatttgagttatcaacaaacgaactggagtattaatatttggactatctagttcatcaactttgtcagcgtattcagaaacaatttgtgattgatcatttaaaaaattttcattataaacaactttaactgctgaagataatagtgtgaaaatcgaagtacttaaataagaattgttgattttttcaaactccattttttcacctataccaaaagctacatagaattttttaaatagttcttgaacgtcttttatatatttttcataaatatattgaaagccttcagttttatcgtcatttgtaatattggatagtttataacttctggtaaattctggcttgactaggtctgtaatttttacagtaaataaagcacttccatttaaattttcttctattttagttacagtatattgatatctagtgttgattggattgttgaaaaagaagaattcatctgacttttcttgttcatttttgtttgtatctttattaaaagcactaatgatttctgacattgttctgcctatatattttcctctgacctcaggttttaaagttggtactttgagcataaaatcaacaggtttaaaagctggcggagcatcaacatcatctattggttttgtattatcatcaacaataggtggcggtggagtatcaggagcagttgggttttgtggttgctgattttcttcttctataggtttgttttgttctaaatcgaactgagtatatttgtcttttaattttgactctaaataatcatctcaagtattaaatcctgttgggggtttgattgtaaatcctggttcttgtgctatgcttatttgttttaaatcatcttttgtaagtggtggaatgtcagaatcttctttaaaaagaaagtctgaaaaggagtctagcatttttttggaataatcagaaattattttgtctaattgttcttttgttacaaaattgtcttcattttccttcttaatttctattttatctttatctgaaatgagtttattatattgggtattgtcatcagttccaaaaataacatcattatattctttaccttgaaaagttattgtacctgtattattttttctatttcttgaaattgcttttggaaaaactgcattgattccaaattgttctggattttgaaggattttatcttgattcgattctagaaaatgagtaatttgttggaaatagtttaattttttaattctatcttcaaaagagatggttgagtcttcatttaatttgttaatttgtgaatttattttgtctattgtgttactaatagctgcttttaacgcgtcttttatagctttgtctgttgtatctttaaaagtatcaaaatcttttgcgatttccttaggtttttcaggttctttaggaggtggagtttgaggatcaggatcagcacttaaaatagttaagaaaggaataaatgaagtaactgaaagtccaagtaaaaataaactttttctttgttttttactcatttttttcctcctttaaacctagtaagtcggacatagctcaaatgtaaaattcatcttctaaatgctctagtcttataaattcattaatttcaattcctactttttgcattgaatttaagtacaaaatttcttgttttagactctgaatatgttttttgtaattattttttttgtgtgttgttttaacaaaaattcttttttcattaagtgaatttatgaaaatttctttgtcttttactaaaatattgcaattttttagaaaaatgtattttgaattgtctgctactaaatctcttactcaaataagaattctttcataagaacctatagtttttggattgggtttaaatcactcgtcagaatcttctatatttataaaaatttctgcttttctggtttcaaaagtttggttgtttaaaaaatgaatttctagaccaaaaatattattatttgccatactgatctcctttgttgaacacagtatgttctgagttgttttttgttaataaaactatttcttctatttcgttttcacgtttaattttgataatttttctagatacttttgatatagtttcatctaaatctttaatgattttgtttactttaactaatccgtttttagcagcataaaatgaagattcgttgataagagcttgtacacaattttgtaaataaattccaatggatgtttgaataaaagagtcaatatctggaataattgcaaactcatctaatttgtttaaatttgtgcttttatcataatttaacaatttatcaatgtcaaaatcttcaattggtaaaatagtaaaagcattgtcttggttcttattagaatttataacaaatcttacttttttatagttatcttgcacatataaaagctttataattgaagctaaattggttgaaaaacttttttgatttagttcaaagtgtttaataacgtttagtttatttttaacgcaaaatgagtttgctttttctccaatagttataaagtctaatttaacatttttgtttgtttctaaaattaaatcttcatatcttgaataactatcagtggaatatttttgttcttcttttaagtaaattcataactctttattagcaaagaatttttcttcaatcttatttaaaaatttatttttagttaaaaaacgtttggttataaattcatttttaatattaaatttattagataaatttattattgcatatttatttaacaaaacattttcaacgtaaaaatttaatttttgactgagtttaataatagaaatcaacaaaatgtttttttcactatttgcttttaaatgtattttttttagattgtctcttttttgtataactttttttaagtgcataaattactacctttttataactgaaataaaatctttactaaaaagagtttttaaagatgaattagtctcagttgatttaaaaattaatagacctggaaatatttctagtattttttgagtatttaatagttttacaatttcttgatttaaattagtaaaaaatgtttgttctgctaaatcttttgatgatgcaaaatttacggctatattattagatgttgttttagaagttattatcggaattaataatgtctgtgagtattttgggtctaaattaaatgagattacaaagtcagcaaattctaaattatgcttgttttttaaagcattttgatagctctgttcgtattttttatacaactctgagttaaaaccttgattagcttttaataaaacataagaatataactgatcataagaaacaaagttgctctcttgtcttttattcttgtaatttttatataaatctactatttcaacttttgttttattatcgaaaattaaatattcttctaagttttgtgtttcaagtttttcttgatttttcttctttttagaagaaaaagaagaaaaaatatttaacattttattattcatttgttgctcctttatctactttttgattcatagaacgaattttaaacattactaagactatatctgctactgagtaaatgagtaataataacaatgtagcaatttgaattaatataataatttgtagcacagataactgagtaataggtgtaaaagcaacggttgaaaagttatatgcactcataagcaaaatttctcaaccttgaaacactaaagctagtgctgataagattaaataagtagaaataaaaaacattgaaattaatttcggatttttatttttaaataaaaacagtgcagttgttgttaaacaaattattgaactaatgaagaaaattattctaatgcttaaagcgtttttaatatagattgaagctatcaaaaataagaagtttactattaattgggctactataaacatcattaagttcatagtgtttccttgaatcttgagtcttgaataaaagtttaaaaacaagtaagaacctaaaataactagtaaaacaacaacaaaaggtaaaaataatttaatactaaaacttgaaatgcttaaggaagaaaaattacctaatcgaattaaaaatataaaatatcataataagcaacttgcaagaatggaaaataataattgtgcttgatttttgaagtaaattttgttgtattctttagaaaaaacaaagaaaatttttattaaattagaaccaaaaaatattattgaaattaagataagggaaaaaattattataaatacattagccacattatctgtttcaaataaattttttatgtaggaatatcaaggattttgaacagcaatatattcagatactttagttaattgaccattgtcatcgtactcatctggtgatactttagtaatattaaatatgaagactaaaaataaaattacaaaaataaattgagaacaaatatttataatcaaaacactttttttattaaatcttaatgtttctgtttttttcttaaaataaaacaaaaataagtgatatgcagtgttagtaagaacaataaacaaaagcagtagcgagatataaaatactgaagaagaatttattattgcttgtctgtttgttggactttgttctccaaaaacatcgttataaactggattataaaatataaataagaaaaaactaactaaacttattaatgtataaataccgaaaaaaatcgtgtatttttttattaactctttttgaaaaaatatattaaaaaagttcttgaccaaagggtatataatacaaaatgctagtattaaaaaccttcaaatattaaggaaatttaaagaaatatgaagatctgtttggtaattccagacatatcttagactattattatcaacaccaaaaaatgttgtgggagtaaggattaatgaagtaaaaattaaaataaacaataataataaagtggagtactttaaaatgatattaagtttattatctttatgttggacattttgattgtcatcataaatttgtttattttctaatgtagaatttgctttctgtttttttataaatatcattttgtccttcttttttgtttattttattttatattaatttgtttatttaattagaatttgtgtttttaaatttaaattcttctggtatttgatttactccatttttaaataatgaggttttgaaattatctccataaattgtttgtaatgcttgtctaaaggaagttttttggtttttgccaccaccataaatcaaatcatattgtggtaagttgtatttaccatatagacctttatagtcaaatccttctgacctaaaagcgacagctaatccagtttttgctgtttcattagaagcaaaataaactccaactaactcattgttttgattacgaattgaagaacctgaagccccacctacaggagcataatgtcttggaagatattcaagtccaaaagctatataacgttttgtgttagccactggtaattcaccaagttcttttactacttttttaccgttttcttctacttcttgtgtaattttttcagtacgcataggattggacataattgttgatttatgaagctcttttcctacttttggtgtagcaataaaagcatcggtgagtcctggcttatcaccaaaacttctataaccaatgtttaaagataaataatttcctttatttgctttttgatttattggactatttggattattttcatcattatataaagcattgtaaaatgaagcatctgagttcattcaaagagaaaaaccttgtttatttaatttatagtcatattcatcttgatatttatctaaaaagtaatcaccagtagcttgtggataaccaacaataaataattgatctgtattaggagatttgctggtgtctaaatctgctagttgtgtatctgctctagaataatcctttaaataagaagtttttaaaaacttaatgtgtttttctgttttattataataatcatttgtaattgctttaatgtaatcatcgcgagaagaatattctgaaggaacagtgaatttactaaaatctacttccataacagcaaaatctaaaaactcttctgcatccttatatttttcgttgtttttatctacttcagaaagataatcttttggtgaagtgcttaaataatctgttgctctataaacaattctaactcctggaataccataatctgaaggcgaaatataatcagcttttttatcaggatgatcatttttagcacctgaaattaatttatcacgactaaaatctgctgtaatgtaagattcatctgtagcacctttagctgttcttaattttgttctaatacctactgaaggtttaagcactgttaaggtaaattgagtagcatcttttttatattcttcaactacgtggttattggttccaaagtatcatttagttggttgatgaccatcttttgggatttcataatctagaattcacattgttccacgagcagttttttgcattctatttccatctggtccttgactagctaaaaacgcttgtagttcatcaggattgatttgatctattgtagctggatgagcaaattttactgtgtaagtttgtagtgcagcatctttatatttttcgtttggaatatatcttgctaatccattggtttgattttcgtttctattaataacatctcatcaagcaggaccttttggaacttcggaaggatcgtagagcttgattccttcaacttcaccatcttgtttataaactggcatagaaaaaccttttttaagagcgtcattgtatgtatctaaatgaagctcttttgcaactttgttatatttttctatattttgttcagttctatgcacgtcgcttcttcaagaagctaagtcaaaagaatcttttccttgaagatatgctagttgtgattctaatgctgttagatattttttagaatcagtttcaaatctttggtagttatcttctttaaaatattttataaattcttctctagtgcttggtgcaaatctttgtgctcaatttaaattgatttcactacttcttgattgtctaaaaccagaaatttcaacatctttttgtatactaatagttggatcatttttagaagaaatatcaagagtaaaaattaattttccttgatttagtgaagattcatggttaccatctacatattttttgttttcaactttaatatttataagctcattatcttttaaatttgttgtttggaaaattattttatctaattcttcaccaacagagtctatagataaattagaaatatcagaaaatccatctatgttttttaaaacgattggtagttgttctaaagtctctttagttagttgtttaggtgtgttgtctgaattatataaaactgaagttgtttcatcaaggattggtttttgttcagatttgtctgaattaccacctggattattaggtgttttatcgcctgggttagaaggttgagtttttttatcaactggtttattaggtttttgtgaagcttccttttctccacaagcaattaacaaaattggtgcggtaaataatgttgaaattaatagattttttagtgaaaataaccttcattttctttgctttttcataacgtcctccttattttttgttattggaaattaattcctgaaatgttggattcatcaacttggaaaccgttggatcttaatgaatttgccaatgctgtctggcttttatctactattattctttgatctgtgaataatttagtatcatcatttttttgtcttccattttcaagtaatattcttaaattttgagcacctctagcatttaaagttatattacctgatgctgtcacttcaattcttttagtagtatttccgtttgaaaaaaatattttaggttttggttgtgacataggatttgtatctaaaacattaaattgtgcgttatttagttcatcaacatcaattgaaaatgtttgtgaatcgttatataaacctattctagttaaccttcttggtttagaatttgaagctttttgtgtatcagaaaattgcaatcctctaagtgatttcattttagttacccttgttaaatcaagaccagttggataagaattttctgattcattttcatctggacgaagacctggaccaaatcctccttggaagactttttcattatttcttgttcaataagctatacgtagtccatcattaattcgtttgtaatcacttggagaatgaccacctttataatctgaatcatcgaaagctaaagagttaaaagtaactctagttgctacttttgcacctttaggataatcaaaacttacattgtaatcatttgaattatatcaagctgtattttttaaagctcaaggatttattgctcaatcatcagaaagcgaatttccttctgtataaatagaaagttcgtcaattttcttgttttctaaagctaataaaggtgaagtgttagtgctatcgaataacaactcaagctgtggtaaattctcaggcaagatttgtaaaatgtctttgaatttttgatttgcatcatcttttcctatgtggaaaaatctataagaagtaatttctttattgtcggcttttaattcttcaattaattttttagttttttcataaccttttggatttgaaaaatctatagtaaccacaattccatgatcccttgctgattttgctttgttatctgagtttttagtaagttcagcgatattaattccatctgattttgaaacattatatttttgaaattcaggagaatcagtaatatcttttttggttcatcctggataatttccttcaagaatacttcctccaggtcttcatcaatagctatcataaccaaaggcacgacgtgtttcgttatctttttgatacacagaagttacttgattgagtaaaggacttcaggaattagattttaatgttccgtctttatctattgaaatattgctgttgtcaggattaatagttaaacctcttgctaaatactcatcattttctcttgaatttttgttaaattttgaataatctaaataataaattagtttgatgtattttacatttttagcatcggtttttaattgttctgcagctttttgtttatcagtttgttctgcaaattctttcaatcattcattcatttgtatttggttttcaggagtgaatgtttctttgccattaccatcaaatccaattcttggtggtcttcttctttgtagggcttccatctctctttgtgcttgtgcaatagcttggtctgctttaaaaagatcatcttcatatttcttcttaattcaaggataaagtgtttgaccttcttgtgttaaaaactctctgactttgtctccattttcaaataatgcttcaaattttcaaaataaatttttatattgataagcattatttgcactatgtaatattcctgcaatagtagcatcattttttatatcatttttatcaatgttgaagattccctttacagaagcgttaagtgcagttgtagcattttttaagttttgttctcttaattctggagtaacttcaatacttaaaacttcatccacaacttgtgaatgatacggaattctattagctaaaccattttgttgatcatatgcagtgtattgtctgttaggtctttttcgaactctagctgtaacattatgtccttctcatttcaaggttacaacacctacttcatcgtttttaaagttttgtttaatagatggcactggcttttctacaggtggttcagggtcaggagtagaaggtgttggttgtggctgttcttttataatttcttgttgaatatcaggtttttgtggctctggttcaggatctagaatttttggtggatcttctggaggatcaactattactggaggttctggtttttccggttttggctctaatttttcaggttttaaatttttatcattcaaagcatcaaaagctttgttagtgtctgcattttctatagtttgtaaggttacattgttagcatttaattgatctaaaattttgagatccaagttagaatctgtaccttttgaagttgcataataagcaattccaacaactgaaggaatactcaatactgtagcaaaagaaataagaattttcttatttttagattttcttaaaagttgtgtagtttttttcaaaattgacattgtaacctccttgaatttgccttaattttactcctatttcctttttttttttttttttggcaagctctctgcgaggcatattaaaagactactttaaaacaattgttttaaagcttcgtttataaagcaaaaagaaggaattttacttattttttcttcttgaaagtcttaacaataaaacttcctttatcttcttcagaaactaggtcaaaaagctctcattttatgtcttttaaatatctgtttccttcatattttccttttacaaaagaaacaattaagatatctgattcagggattaatgcagtataaatcatcaatccacctgtgatataaagatctttttctggattaccttgatattctttaattaagtgagaataatctttaattatgtgtacttcagggtgatctacttgaaatgtaggatcatcactaatgacatacatttttcttctatcaaagatttttggtaaggataaaaatgtattttttcccatcaacaaggttttatctaatgtagtttgtctaaaatgtgcaaattcttcttttatgtgtcaaggcattgaattgtctttacctattagaccatcttctgtcattgctcaaactgaaattatcattatactgctacctctcctttaataaatggatcatgttcataatctatgagttctaaatcttcaaatttaatgtcaaaaaaaggtttatttgctatttttaattttggtaatttgtgtggtgttctagtaagttgtagatttacttgatcaatgtgatttacataaatatgagcatcacctactgtatgtacaaattctcccacttctagtccacattcttgtgcaatcataaaaactaacaaggaatatgaagcaatattaaaaggaacacctaagaaagcatctgcgcttctttggtatagttgacaagaaagtttattattggctacataaaattgaaataaactatggcaaggaggaagcaacatattatcaatttcagtaggatttcaggctgaaactattaatcttcttgaatttggatttgctttaatttgatcaataactttttttagttgatcgatgcctaaaaagtttcttcattgtttcccataaacaggaccaagttcaccaaattcctttgcaaatgaaggattttctttaatttttgttataaattcttttagtgtctctccttgaaatttactactttttttgtaattttcataaggtcattcatttcaaatattaacgttattatctactagatactttatatttgtatctccctttataaaccaaagtaactcatgtgctattgaagcaaaattagttttttttgtagtaactaaagggaagccttcagataaatcaaacctcatttgataaccaaatgtactgattgaatcaataattgttctattctttttttctataccattttttagaatatgtcttaaaaaatctaaatactgtttcatcatttcctttattttcttgactaatgttttaagatttattataaacagaaaataatgcaaaaaataaatttgaaaaaaaattttttaattcatttttatttacataatttttttgatttttggtaatatataaagactaaacacattaataagctcattaataaactgacacatttttggtcagtttatgttgactaaaaaggggtaaagactatgaaaactgcagaaaaaaaacaaaaaaattcatattacaaagattcagtttctcctttggaatttgcgcttaacaagttccagggcaaaatgaggtcagtaaactgaaatgtcatcaatgataataaggatcttgaagtgtgaaatagagcagttcaaaatttttgacttcctgaaaaaattccagtttcaaatgatttagaaacttgaagaacactttctccaacttgaaaaaaagttataacaagaacttttacaggtttaactcttttagatactattcaagctactattggagatgttgctcaaattccttactcacaaactgatcatgaacaagtaatttatgctaatttcgcttttatggttggtgttcacgccagatcatacgggactattttttctacactttgtacaagtgaagaaattgaagaagcacatgaatgagtaattaatactaagagtttacaagcaagagcgcaagctttaattccttactatactggtaaagatcctttaaaatccaaggtagctgctgcgatgatgccaggatttttactctatggtggtttttaccttcctttttatctttctgctaggtctaaacttcctaatacttcagacattataagattaattttgagagataaagttattcacaattattattctggttacaaatatcaaaagaaagtggaaaaactatctcctgaaaaacaagaagaaatgaagaaatttgtttttgatttactttatgaattaattgaattagaaaaagtttatttaaatgaactttattctgaagttggattagcagatgaagctataaaatttagtgtttataatgcaggtaagtttttacagaatttaggttatgattctccttttgcagaagaagaaacaagaatagaacctgaaatttttaaccaactttccgcaagagctgatgaaaatcatgatttcttttcaggcaatggttcttcttatgttatgggtgtaagcgaagaaactgaagatgaggattgagatttttaatatgcacaaagatataattcaaatagatgaaaaatttattaaaaaacctgaaggcgagatttttttagtttatttttcttctatttcaaacaacactcatagatttatacaaaaattaggtttcgaaaatgctagaattcctgtaaatccagaagaatcgctagaagtagatagagattatgttatcttttgtccaacttatagtggtggcggaaacgattcagctggagctgttcctaaaccagttattaagtttttaaacaaagaatccaatcgtaaattttgcagaggagtgatcgcctctggaaatacaaattttggagacacatttgctattgctggaacaatattatccaaaaaattacaagtacctttactataccaatttgaattaataggtacacaagcagatgtaataaatgtacaaaacataataaaaaaattttgaaacaaaaattcctaaatttttccattttagtgaagaaaaagaaggaaattatacataataaagaaggaagtgaatattatgactaaaaaacaaacagaaagtatgtcattaacagggagcgtttctgaagaatacattactttaaatgcaaaatcaaaattgtttttaaaatataaagattcttataaatatgatcaacaagctgctgatagttatattaagcatcatattgaaccaagatatagaaaatttaactctgtaaaagaaagaattacttgattaattgaaaacgaatactatgatgaaacagtgattaatgagtatacttttgaagagttagaaagactaactgaagaagcttataaatacaaacatcactttccttcatttatgggagctttaaagttttattcaagttatgctttaaaatctaatgatggacaagaatatttagaacattttgaagaaagagctcttttaaatgctttatttttagctaaaggaaatgttgatagagcttcaagtattttaagacaaataatgttaggtcgttttcaaccagctactcctacttttttaaatgctggaaagaaaaatagaggtgaatacgtttcttgttatttaattcgtattgaagataatatggaatctatttcaagagctgtaactacttctttacaattaagcaaaagaggtggaggggtttcaattttactttctaacttaagagaaatgggtgcaccgattaaaaaaattcaaaatcaagcaactggtgttattcctgttatgaaaattcttgaagactctttttcttatgctaaccaattagggcaaagacagggagcaggtgctgtttatttaaatgttcaccaccctgatattttaagttttttagatactaaaagagaaaacgctgatgaaaaaattagaattaaatctttatcacttggtgttgtaattccagacatcacttttgaacttgctaaagacaacaaagacatggctttatttagtgtctatgatgtagaaagagaatacaaaaaagctttttctgacatatcaataactgaagaatattacaaaatggttgaaaatccaaacattaaaaaaaccttcataaatgcacgtaaactctttataactatagcagaattgcattttgaaagtggttatccttacattctttttgatgacactgtaaatagaagaaatgctcataaaaatagaattgttatgtctaatttatgttcagaaattgttcaaccttctactccttctgaatacctttcagatcttacttttactaaaaaaggtgaagatatttgttgtaatctaggttctttaaatattgataaagcaatggaaagtggaaaagaatttggagaattagttttccagtcaattctttctcttgatcatgtatctagaaactccgatctttcttctgctccttcaatagaaaatgggaacaacaaaaatcatgcagttggacttggagctatgaacctacatggatttttagctacaaaccatatttattatcactctgaagaagcacttgattttactaacattttcttttatacaatggcttatcatgcttttaaagcttcatcaattttggctcaaaaatttggtccatttgaacacttcaaagaatctaaatttgctgatggttcatattttgataaatatactaaagtatctgataaagaatatcaaccaaaaacagaaaaaatcaaagaaatttttgagaaatacaaagtttcaattcctacaaaacaagactgaattgaacttgttgaaaacattaaaagagtcggaattgcaaactcacatttaatggctgttgcgccaactggttctatttcttacctttcttcttgtacaccaagtctacaacctgtagttgctccagttgaaacaagaaaagaagggaaaattggtagagtatacgttcctgcttacaaaatgaatcaagaaaatatgaaatattatgctttaggagcttatgaactcggtccagatccaataattgatattgcggctgaagctcaaaaacatattgatcaatctatttctttaactttattctttactgatacagcaacaactagagacttaagcaaagcttatattagagcatttaaaaaaggttgtgggtcaatttattatgtgcgtattagacaagaagttttagaagactcagaaaactacgatgaatgtgaggcttgtgtaatttaatatgattatagataaaattaaaaaccttcacaaatatacaaaaattaatccaagattagaaattgttgttaaatgattacaagaaaacgattgaagaaaacaacccgaaggaattactcctataaaggaaaaagaagtattttttgttaatagagtaatgccttctttaaacaaagaaaattttgtttttgaacttcatcaaaaatacattgatattcattttgcaggtgataacactgaaaaatttattcacttagcaaaagatcatttaactacagctcaacaagaatattcagatcaaacagatgtaggttttttcaaaggtgatattcttgattttgaaaataatattattaaattaaaagaagatgagtttgctttatttttagctgatgaagctcatggtcctagatttgatacaaccaaagatactgtgagaaaaactataattaaggtattagcttaacctataaaaaagaagactttttactttaaaagtcttcttttttataggttgttttttataattaataacaattaaacaatatttttaattattaaaattaataataaaatatttaataatttttataattatattatcaaaactactataatttatgaagatgatacaagagagaattaatatatatatatatatatatatatataacagcaaattaatatttatttaatttaacacaagaagttttactttttgtgtttttttcgtttaaggaaaatatggcaactacattaaaatttttttatgatgaaaggcactgagatagacctattagatctggagtagcaaaaagaagttgaggtgcttttgaaaacgatataacactcttaaatgctcttaaaaagagtggtgaatttgataatgtttatccaaaaattaaaaatataaaaaataaactacatcaatttttgaaggatttttctgatttagaagaatacgaagtaataagacttaatttaaaagcaagaaggttcgctaatgaattaaaagataaaaaagaaaaaaagaaaagacttgaatttgatggttttgtaattattggaaaaaataaaaacattaaaaaagagtgggggtaaaaatacagctgctttatttttcgacatagagttattcccactttcaaaccttaattttgttattgaataccctgttatatctataaacagaatttcattactgaattttactcatttaaacaattctatacacaattctgatttcaagcctgagtttttacaaaaaacaccagaaaatatttctagcttttctccaagcaaccacgatgaacttcttaatttttttagtgaaaaagttcctaaaattttagatatttataaacatgatttaaaggaacgtttttcgtttacttgtccaacagatagtagtaaattgtgctgaaatgaacttttagatttaactcaaaaacattttttagacaaaataaaagataacgataaagactttatttttatggaagataataaatctaaaaactttaatatttctgaaattgataaagagaaatttactattttttcttattcttcagatattgcaacaaaaagaaatttatatttaaatgatgaaagaacaggaaaatcttttactattaaacttcataacttgaatcaaaaattaactataaatgaatatttaaatcatggacaaaaagaaatagacgccttagaaaatattattgcttcttccaaagcacaaaagtcagaattaattgaaaaatatagagaaaatgaagaaaaaagaagaaaaataaatatggaatttgaagaggctcaaattcaatataattctttaattaacaaaataaataataataatcaattattaaataagtatttaaaaatcaatgaagaaaaagaaaatatagaaaaaagggtaattattccaacaattattgcacgatttgaagaagaagaagtttcggattatgaacaaagacaaagagatgcagaaattgaatatcaaaataaaattgaacaaaaaaacagacaaaaacaaaataaacttgtagagttagaaaatatttataacacaataattgatacttttgaagaacaaaatattagtgttctttctcgttttgatacagatgattttttaaacgaaataaacaaatttatagtaaataataatcaaaagaaaaaagagattgaagaccaaattaagacaaatacaaatgattttaaaataaaagaaagtaaattattaaattttcaaaatcaaataaaatctgaaatttcaatgattaataatgatattgaatttaatgaaaacatttttaattcagaaaatacaagattacaaagcttaaaaaaactcaaaggtataaaaactgtttacaaaaatgttactataaaatgaagtgttaaaaaaggtgaagataatgatgattttactttaaattactatccaatttctgattttttgaaagataaaacaagtaacatcatctttactcttaacgacaatcaaacaggctttattactaaaatcagaagatatttaggtgcatttgcaaacatatataaaggattttacaaaaatccgtacatggttcgttcaatttttgatccacaaactattaattcggaacttttaagaaacacacagttagagcaaagtacaaaacaaaaatatcacttaaacgaaaaacaagagcacagcgttaaaaaagcaatagcttctagagatgtgttttatttacaaggtcctccgggaacaggaaagacacaaactatttgtgcaatggctgaagaatttataaaacgagatgaaaatattttaattacatcttctacacacgaagccatagaaaattttatggatcgtttaaatgaaaataatcttaataatcctaactatataatctttaaatttgactataactctaaaagaagcaacgactttcaaacttcaaaaatttatcctaatttcatttctaaaattgagcattgattagaaaatccacaagaagaaaattctattttacaagataaaatatcggaaattgaaggatgaatcgaaaaaacaaacttgaatgttgaagaatactttggatttagcacttatctggatacattaatcgaaagaatagaaaaaaatgttgtttttgaatttgaaaaagagcatttaataaaagaaggttttgatataaataacataaattccataaacaattattacattggaacacacaaaaatagaattaaaagtaatcaagttttaagtttgatagatgatttgtttaaacttgctaaaaataataatattaatgtttggggcgctaaaaattttaaagaactaaaaagcaaaattttgaacaaagattcaacaaaaaatgcttcatttttaaaggatttatacaaaacttataaagaaaataccaatgaaaaaaacaattatttagaaagtgattttaataaatttgtttttgaaaataacttaataaatgttattggtatcactacaaccgcaagtacaaaaattaatttatctgataaaaatggtgtcggtgttgctgacgtagaacctaaagatttatttactgaatatccgattggtgttgttattattgatgagatttcaaaatcttctactcctgaaatttttgtaagaattatattagctgaaaaagttattttttcaggagattacaagcaacttcctccttctagtgaattcgaaccaaatattattaaccaaatttacgatgaactgcctgaacaaccaattcaaacctattctctaaccaatcaatatgaagaagaagaagattcagaatttagttatataaaagatataaaagataaacgatttgctttaaaaattgaacaactttataaaaattctttctttaaaacgcaagcaaatcaactaaaaaatttaaattcagatagcacatatgaatttttaaacacttctcacagattttctcaagaaattatgaaagttgttaatgtcagctacgattttagggaaaaattaaaattacctgcacaacctagagactttaaaggtatgcctttcgagtgagtacacaacaatttagatgctataaatcctataatttttgacacttcttatctacatgattcttatattaaaaaattaagagaaaaaaatgtaaatattcctacaaaagcttctattccagaaatgtcttcattttatttattcaaccaatttcaatcttctaaatccgcaactgaaagttttgatcaaagaagttttatttttagagaaaatttccaagcaaaaaatactggtacagtaaatgaatataatgctgaagttattaaaaaaattgttaaaaaaataatagaaagtaataataaaaaacaaatttataaaaatattcaaaaagagattggtgttatttgtttaactagaaatcaaagttatttaattaaacaaatttttgctgaggatgaaatattcaaaggaataaaagttgacactatagataactttcaaggtcgtgaaaaagaaattattatcgttgactttataagagccaaaaataaattagaagatgctccaaattcttcaacaaaagaatgaaaaattatcagcgatataaaaagagatacaagttttttaaacagtgatgaaagaataaacgttgctatctctagggcaagaaataaattaattttagttggtgcgtttagatattatcaaaatataaattctgatattttaagtaatattttcgatgtttttcaacgaaataatttcactattattaacaccgaggaacaatatgagcaagattagttttgaacattttttaataccaatagcagaataccaaattgattttacttacagacaacatgttgaattagaaaagttagaattttttattttatcgcttatttatggtggtcaaatcaaggataaaagcattaatttggataaaacattaaaagaagaatttaaagaaaaatacaatataaaagaaaagttgtttgtttattttcaaattttacttgtaaacttaattcaaagacaaattgttaacttaagagataaagctttaaacgaaaaaatactacaaaattctgaatttgattacactgaattaaatgacattttagtaggtgatctttctttaaatgaagacttaaaaaagttgtttgataaaaatgtttttaaatcttttgaagcagaaaatcgaagagacaaaacttatgcatacattcatgtaatccctgaattagatggcgcagtagaatatagagaaagaagaaatgtacaagctattgaatacaataaagagttgcttgaagaactcagaggatatgttaaaaattttgtaaatatagaagaacacaaagaaaaaagaagaaaaagagctattgcaatttcagaaattattgaaaaatataaaaaagataataaaactgttttatcttctactgaaacagaattagataatgaaaatataaattttataatgcaaaatatttcctttgcttataacagttctgatgtatatacttgagaacctacaaatgaatcgagcgaaattattgtaaattatatttctcaaccggaaattgattcttcgaattattttcaaaaacagatagatgagttttttaaatctataataaaaaaactcgatgcttgcataaaaatagagacacatattctagacaaatttaaaaaacaactattaattccttctcaaattgaaaagtgaaaagataaaatgaacgttttatctcagttaggttgaaataatgtttactgaaatgaaaagaaagaattaaattttatttttgaatctaacaaaaaatatttaacaatcattaataatcaagaagaaaatagaaatataaattttgaaatttcaccacattttgtaaatgttaattttgaagaacaagatgaaggaaataaattaattttaaaaaagattgtactagattttttacaaaataaaattcacaatattgaagaaattgatctaaaacagtatgcgcaaatacctgattttataaaagagtttttttattctcaagctactaaaaatccaacactttttgaaaaatggtttaattgagttgttggttcatctttatttaaaattgaagatatttttgaagattgaaatgtttttgatttatgaagtagaaacgaaaatattgctaaagattttttaaaacttttagataagaaagggataaatattaaacaacgtttaatagaagatgcaaaaaccaatgccttatcttataaaaataataagatttttgagttttgttttgaaaactttatttttgaaaaaatcactttcaataacttaccgtttttagaatattgaagcttaacaaaatctgttgaagatttaaaaaacaaatataaagaacttaaaaattcacttgatgaaattgtttacacttttaaaaataaagatatttctaaatttcaagaagatcagatgtttgctgttaaaagaaattgcgaaatggaaattaataaatttaatcaatttattaaggaagtagaaactttctgtactaaaaataaggcttttgtagatattccagaaatcgaaaaatttagtgatgaagtattacaaatttctactttttatcaacaagatttaaaaaaggagtgtatggttttagcaaataactgcaatacagaaatagaaaaaagtataagtgatggtaaaatcgaaaatctaattatagaagtggatgctttatttaaaaagggagcaattactagcgaagaaggaaatattttgaaagaattaagaaattggagaaatggcatatttcataagacagaagaaaacaaggaattcactatagaagaatataaaaaatatttactattatctagaaaattaaaaggaattactaataaaataaccacatttcgaattgaagaagaaaaaagaagaaaattagaagaacaacaaaagcttgaagaagaaaacttgaagaacaacttaagttagaaaaaacaagcaaaaaacaaaaaaataaataaattttaaaatgaacaaataaaggggacaaaatgtcacaaattacttatttaactttaaatgaaccagaaattaaaaaatgcgattctttattaaaagaaattgaagatttaagagaatcgaatgtacttgataaaaattttcaagaaaatttagaaaattactatacagaattaaaagaattaagaaacacttttcaaaaaggacaaggaattagaaattatattagactggattgattaagacaactcgatagtttatctaaaagaatttctaatttagattgaaataaagaaattaatgcttatttagatagagtttctaaaaatgcaaaagtaaatgtgttccagttttatactcaatacggaattgttgcttatgaagcgattgaatacttagaaaccactaattctacacttacaaatgaattaatagaaagtacaatcacagaatttttaaaaagagaagtagatcaagaaaaattaaattcttttagaaaacagatgtttgattgaatagataaaaatcttgaaaaagaatcttcagaaattagatatgaattaaaaaatttcattaaacaatacaataattttgaagatatttcagatttagtttatttaataaatacaagaaaagaagaaattcaaaaaattaattctttagtgaaagtagttgctaagtctttaaaagaatctgaaggtttcgttttaaataaagtattaaaaactagtctttctgataaaggaattattagaaaagtgtttaggtttgtaaacaaaaacaacaattatgtagatgtagttgttgacggtaatttagaaatttcatacaaaatgggaaattacattggtcacgcttgtgaaaaatcagctaataaaattgtagaagatattaagaaaaatggttatagcatacaagatatgaaggtaaaaagagatttaaaaactgataaaccaacaacaagagtttccgttgttaagtcaaggacaaggtaaaaatgagtttttataaagcattagaatctatttttgtaaaatcagctcaaaaaaatatcttgcttctttctgaaaatatttttgattatatttttatcagtgatattaaaaatttctttaaaaaagaagaagttttaagagatttaaacgaagtaccaactagtttttttatagatttacctaagtttttatctttagtttttagagagttagattacaaaactattaaatacttttcacctagtacaggagttacaaatttaaatagaaatctcgaagaattaataaacaataaaaaagaagaagacgaacctttaaaagaacaaggttatgaaaatgatgacgatctgttatctgaagaattagaaaatcccgggaatgaaataccgccaatcacagtatttattaactctataattgaagaagtgaatgcttacaaaaatgatttagtaaatgaaaaagataaaaaaagggtttatataattgattgaggtgatttactaactcgaaacagtgatcaaattattacaattaatgttttagctggtttaatcaaaacttttatcgataacttagaacataatgttcctggtgttaaaaagtcaaactttaaactgatttttatatgcaaaaacaaagatgatttaaacaatgtcatttataataaaaatcctgaaattaacttcatttctatagcaaaaccggacagtgaagaaagaaagaaaatttttgaaattattttaaaagatgaatttaataaaaacttcacagagcctataaaagtgaacacttctcagtttgatgaagttatttctcttacaaatgatttatcttttagggaaattgtccaacttttaaaagtttctcaaatttctaaatttgaaaattttaagtctttatataccactatatttttcaataaaaaacagtctgaatgagaaaaaatttctccttcacaattagaaaattttgaaacaacaattagcaaaagagtaaaaggacaagaatttgctatcaaaaaaattaaagaaactttaataagatcttttgttggtttatctgacttaaattctttagaaacaaagaaaaagccaaaaggaattttattttttacaggacctacaggaactggaaaaactgaaatttctaaagcactagctgaatttatttttggtagtgaaaatcatttaattcgtttcgatatgtcagaatataatttagaacatagtgatcaaaaattaatcggagctcctcctggttatgaaggtcacgaagccggtggtcaacttacaaatgctataaaagagaagcctttttctatagttttattcgacgaaattgaaaaagcacatggaagaattttggataaatttttacaaattttagaagatggacgtcttacttcatcaaaaggagaattagttgatttttcagaaacttttattatttttacttctaacttaggagttagcgaagtaggaaaacaaggtagtgatttatctgatgaagaaacaagaagaacttttacaaaagctgttgaaaatcactttaataaagaactaaaaagacctgaaatcttaaacagaatcggtgtcaaaaatattgttccttttaattttataagtgataatcaaatcaaaaaagatattattacttctaaatttaatcaattaaacaattgacttaaacgtgaaaaaaacattaaattaagtgaattaaatgaggaacaatgaagaattttgatttttaaaattaatcaaatttacgacaaatccttaggagctagaggtttgatcgcttgttttcaaagtatttttgttgatattttaagtaattatttatttagtattcacactgatattcaaaaccatttaaacaatgcttcagaaaatcaagactatttaataattgatactatttttgatgataataaaataagttttgtaaaaaaatagataaatttctgagcggatccccttttcttaggaaaatagaaaaggggattttttatgaaatattcattagaatttaaattagaatgtgtaaaaaaatacaaaaaaggaattgaaattaaaaaacccgattttgttaatacaagtcagaaaaattttttaaatcaagtaattttttgagaaaaaatttatgacaaattaggagttgaaggacttaagaaaaaaccacgaaataaaaagtgaactatagatcaaagattaaacatagttaaaagatttttagctggtgaaccaattgttaaaatttcacttgaaaataatcttaatccaagtcaaatatcttttgaaagaaaaatatttagaatcgggaattagtggtttacaattaaacaaaggaagacaaataatgaaatctaagattaataataataaatctacaaaaatatcaaacaattccgatagtcaagatcaatcaaattcttcattatctgtatatgaagaactgaaacttcttagaaaagaaaataaacttttaaaaaggaaaatgaagtactaaaaagtgaaaagccttggtagagatctttgactcaaatcaaccaaggcaagaaaaataaaaacatttataatagagtaaaagctgacaaaaaccttcgcttaactcaagtattaaaagagttttctattcctatatctactttttattatgaactcaaaaagaagattttgacaagaaaaatgaagaaattataagccaaatgaagcttatttttgatgaaaataaagcaagatatggaaaaagaagaataaaagcagaacttaataatagaggctataaaattggacttaaaaagttcgcagattaatggaaaaattcaatctcaaagcaatttgttctgataaaaatacaaatcttacaaaggaactgttggcaaaattgcagacaatattttaaatagaaattttgtcgcaactcaaccaaatcaaaaatgaactacagatgtaactgaatttagcggatcatttggaaaagcatatttatcaccaattttagatatgtttaatggtgaagttattgcttgagatttgtctacaagcgctaacaaccaacaaattagaaaaatgctttaaaaagcattttcaaaacacaaaaatcttgaaggtttaatttttcacagtgatcaaggttgacagtatcaacatagacaattttcagaaaaattaaaacaaaaaggaataattcagtccatgtctcgaaaaggaaattgtttagataatagcgttattgaatcgtttttggaacattaaaagagaatgtttttatggtcactgaaaaagaatttttaacttttaaacaacttcacaaagcaattgcaaattatatttattattacaatcacaaacgaattaaagacaaaataaaatgaatgtctcccattaaatttagagaaacattcatttcaaattataattaattaaaacacttaaaaattttagaagaaaagggtaccacctcatttctttatctattttttttcttctttttatctaccagtttgtttatttggtttagcagttgctatttcttttgttttagtagaaacatatattgcagcgtcttttgtgttatttacaatagtggttttattatcaatacctaattttttaactccgtttaaaaatgatcaaattttaaatataggagtagtaaggcttttaccaaatgtttttaatatttttgttggtaatttctttaaatcatctaatttttgaattttagtaatttcttttcttgcttgatctgttaattttattccactatcaaacatattatacttaagattggagcttaaatggctattaacttcttgttgtgttttaatttcttttgcttttggtaaatctttttcaaatttatctctttcggatttaaaacctttacctaaatttatgaggtttgaaattaaaactttttgtagaattggaacaaattgtacaccttttgttttagctttagcttcaatttctttgagttttgtagaaaaactagcaactttatttttagctttagtaaattcgctagaatttgaatcagaatctgaaatttcttcagaatttttcttagatcatttaccctttattttatttacaaatgattgaacaacacttgaatagtttttaatcatatctgttacatttggaacaaaatcttttgtataagtttcaattatctctttttcaatattttgttcattttcatttaatgatttttcacttattgctttttcttcactggtttctgcaacaagaactgatggttgtgcttcttcagtttcttctattgttgcatcatcagtttcaccattatcaacttgtttttgtccgttgtcagatggtggagtagaagatgggggggttggttgagaagtgttatttcctccatttggggggggttggttgagaagtgttatttccgttgtcagctggtggattagaaggcgtagttgtttgaccacatgatattgctaacgttgctgaaaataaagaaacaatagacattgaagaaaataaaagttttttaattttcatacttttccttttatatatatttgtgtaattattaataattatgtgttttatttattcgctattttattaagcataattatctttatatttaatattcataagccgaatattgcaataattttacttttttttttttttttgcaagatttagtaaaattttttgattttttcttcaaaaatgaagaaaaaataaataaaaaatcctataaatttgagcagatccccttttcttaggaaaatagaaaaggggattttttatgaaatattcattagaatttaaaatagaatgtgtaaaaaaatacaaaaaaggaattgaaattaaaaagcccgattttgctaatacaagtcagaaaatttttttaaagcaagtaaagttttgagaaaaaatttatgacaaattaggagttgaaggtcttaagaaaaatccacgaaataaagaatggactatagatgaaagatttagtgttgttaaaagatttttagctggtgaaccaataattaaaatttcacttgaaaataatcttaatccaagtcaaatatctttttgaaagaaaaaatatttagaatcgggaattagtggtttagaattaaacaaaggaagaccaataatgaaatctaaaattattaatgataaacattcaaaagtttcaaaaaatttaaatagtcaagatcaatcaaattcttcattatctgtatatgaagaactgaaacttcttaaagaagaactcaagcattttaaaaaagagaaaaaaaactttgaaaaagaaattaaacttttaaaaaaggaaaatgaagtactaaaaaagtgaaaagccttggtagagatctttgactcaaatcaaccaaggcaagaaaaaaaaaaaaatttataatagagtaaaagctgacaaaaaccttcgcttaactcaagtattaaaagagttttctattcctatatctactttttattatgaactcaaaaagaagattttgacaagaaaaatgaagaaattataagccaaatgaagcttatttttgatgaaaataaagcaagatatggaaaaagaagaataaaagctgaacttaataatagaggctataaaattggacttaaaaaagttcgcaattaatggaaaaattcgatctcaaagcaatttgtcctagaagaaaatacaaatcttacaaaggaactgttggcaaaattgcagacaacattttaaatagaaattttgtcgcaactcaaccaaatcaaaaatgaactacagatgtaactgaatttagcggaccatttggaaaagcatatttatcaccaattttagatatgtttaatggtgaagttattgcttgagatttgtctacaagtgctaacatccaacaaattagaaaaatgcttcaaaaagctttttccaaacacaaaaatcttgaaggtttaatttttcacagtgatcaaggttgacagtatcaacatagacaattttcagaaaaattaaaacaaaaaggaataattcagtctatgtctcgaaaaggaaattgtttagataatagcgttattgaatcgttttttggaacattaaaaagagaatgtttttatggtcgcgaaaaagaatttttaacttttaaacaacttcacaaagcaattgcaaactatatttattattacaatcacaaacgaattaaagacaaaataaaatgaatgtctcccattcaatttagggaaacattcatttcaaattataattaattaaaacactcaaaaaattttagaagaaaagggtaccaactcaatttataggatttttagtaattattaagttatttaaactctaggcttctagtaaagttttatattttgttattgtgtcgtcaattatttttttaagtgttgaattagaaaaattatctatgtcagtcttagttggatttgggtgtaattttttaatataattagaagtaaaatctcctaatttattaatttttgtttggagttttagtaattcaggaagaaatgtaattaaaatgttgcttgattgtacactaagttcttcttttgacaatttatctaattgttccttaatagaggcttgtttttcttctaataattctgcaagtaatttatttatatttttgtttacaatattttcgaaatcttgatctgttttgatgttatcaagattttcaggtaaatctgctttttcaaattcgttggattttaatttagctaatactctgttaaatttttcaattgattcttgttttattaatttttttaaatctatatgaacaagttctgctttagttttagtattttgaagacttgattcgtaatcattcattaaagttaatgattgagttattaaaggtgagaaatttggattggtaaataaatttccttcattttctgaagtgtttgattgaatattcaatttcacttgaatttgattagataataaattagttagtagttttgttattgtatcagaattattttcaataaatggttttactttttcagctatgaatttattgtgaacttcttgtaattctttagttaaattttgttcagcagctgtatttgtgcttttgcttggattattagaagtttcgctttgattatttgaagctttatctttgtcatctatttgtgtaggtttttcttcattttcgttcccgcaagaaactaaaacagtggaaaacaaagcaattgtacttattgaactaaaaagtaattttttacttatttttttgattttcatatatttccttatttgtttgtattatcttctgcttcagaatataaagactctaatcttactgtggattgatcatctgttctgaattggaaaatataatttggatttagagattgttctttgttaaattcatcaaaaattaaacgtggatagtctctatttttgcttgcttcaggggtttgagtattatttttttgttttgttttaggttgtcttattgctgttccgtctttgttgaattttaaaggaacttctttggcttgcgaaatttttactcccgttgcttttatagttgttggatttttgtcataagtagaaaatcttttgtcagcgattcttaaagtactaaaattagttggaatgtaatctcaatttaaaaatgtttttgcttcttgttttttagaatcacttacttcataataaactggataaacttccatatgcacatgtggagttcaacctccgtttacttctgtagttcctatttttccaaaaggttgatctttctctaaatataaaggagtttttggtgtaatatctttaactatttggaattttctagttcctattgtttctgtagttacagtacctaattgacttaaaaatgaaggatctaagtgaatgaaaaagaagattaatgaatctacatttcttaattgattatctttgattttttgatcaatatctaaatcttttactttaacttctaaagttacttgtgcaccaattccagtccctggggcgttgttttctaagtaatatgcacttataactttggattttgcaaaggtttttaaaatcatccctgcatcaactattacatcttctcctatgtgtaaagctgctgtaaattgtggactagtatagaatgttctaaattcttggtaacctccaggagtagcaaatgaatttgctaactggtttactgaattggttatttgcaataagttttctcttggtaattcaggaatggttaaatgagctctttctggtttatctaacttttgcgctatgtctgtgttttctctatcaaataattctaagtgttttggtaatcctacttctttttcaatgtaaataggttggttagaaaaatttttcttgtcagttaattgtatagctagttttgctgatctgtttttttgtgaagtagataaaactgaaacaatttcttcttcatatcttggatttgtatttttaatttcgaagtcataaatacttgttttatctcaaggataatttatagctgaaatatggttttttaacttaatatcaattttttctttggttagttcaaaaaattcttcttcagttaaatctttgaatttgttgttctctgtagaaccgatagtaaaatgaagatctaaagaagaataaactttatcattttttgcagccactcctcttagtgtgatttcgatttttgaaaaatcagtatcagatatttttgcatctttaagataataatttacaccgtcttcgattgttggtaaattaaaaattagatctttttcattgtcagaaccaacaaatgcaatgtcatcgatttttctgtttaagtatttagttttttcaatgaatttttgatctgtttctttttcagggactaatgattctgtatatttgatttgtagtttagaatttaatatttttactaattcaagggttgagtattttgacttattttttacatcaaatttagctgcattttctggatttatttgactatctaactgtaaaactttatctatcagtgtttgtttttcttcatttttcttgaatcctggaacttgttttgttacaacaaaatcttgttcacgttttcaaggattattttcagaagtatcaaaatatctgatgtttaatggaacatctaaaacagaagtgtctctatcattttcttttacttgtgaatataaaatttcgtatgaaaagtttttaatattaagtttaaagtttttaggttggtttttattaaagttttccaccgctttatttagttcattattatcaatgaaaatttctaaatatttgtggggaagtagattttgtctaaagttagaaattaaaacttgtgattgatctagttcttcatttgatacataatttacattcacaaattgttgaaaattgttttctaaaaaggttccaagttgatattgaggaatgaaaatactattttcggtatttttgatatctaaaaagttgttagctggtgtttgtccttctgttggaaagcaagaaacaaaagaagaaaaagctaaagttggtataagagtcaatgcaaatgattttaataatttaatttttttcatatttttccattcttatgtaaatttaaaactgagttttgaacttgatgaaattgctaataaaataagtgaaataataatcggagctaaaacacaaatcaaagttctaattacgttttgtaaagaaacatttataattagcgatttgttatctttaaaagtagatttttttagtgtaataactataaaaataattaaatctattcagtgtttgaaaaaaataaaggtaaagaacccaaatcttgctgaaagaattaataagaagaaaatgaagaaaatttctataatataaatgttgaaaatagtgaaattagcagctccactggttcttggaattacaattaaacctaaagtcattgctgttataaaaaagagttctttaaatgtaaaaacaagtaatttttcttcttttataaacaaaaattctttgaaatctaatttattttcttcttcatttgtttttattttttccaaacatctaaataaaaaataaaacactaaaatagctaataaaactcctaatagttgtccgcctaataaataagctattccgttacttaaaacagctcctttaaaatctttttgtattcctaaaataaatgcatctgatataactaattgaggtaataaaaaagcttttatcggatagtttgctgcaaaacctgcaatacctattgttaaaaataaagttgagaaaaatgaaaaggttaatataccggaaagtaaaattaaacttttatttttcttatttttaaaaaaagaataataggaaagtaaaacgaataaaataagtaaaaaactagctaatatttcaaaaataaaggtttttgaatcaaaatttgtttttaacgaatctatcttactcatatctttcctctttagtacttcttaaaattataaattaacaaggcaaaaaacaataaaaaaacctactaaactttttttagtaggtccgtaaataaatagttgtaactgctaataaaattaagtataaataaagttgtttaggcaatatagtaacataagattactatactataagatttttataaagtgatttcatcttgaataaaaaaataataaaaaaacaatttaaaataaaaataaaaataaaataggaggaattatttaatataatcattaaataattagaaatataattaaaataaaaaatcaagatgttaatcaagtaatggattttattagactatttattacttaatattaaaacttgaaaaccccaccatttttcaagtaggaagatgcctatgccacccatcttctccctagttatattttactacttttatttaatttaaaaatgttattttaatatattataacagttttttctgtgttaatcaaggtctcattttttctttaaagaaattggatctttgaagataatgaacacctaatgtttgagcaatttctcagataccaccgatgattcaataaatttgtaatgatgcttggaataatacaccaaagaagacaaaaactatcgaaataattctttgtgttttttgttgttttttcatcgtttctgattctgtttgattcataatcctgttggtatttttcttatttaaaattctcggcaagatttgttgaacagcttgaactactacaactactattaaaattggaaggtattgtcataaaccttcaaaaagtttttgataggaaattgaagctaattcaagtcctgctcagtaggttacttttaagcttggaataccttgaataacacgtcaaacagcgatgaaaattggcatcgttacaagaacttgagaaaatggtgcaaaaggtgaaaagttgttctttttatagagatctgcaacttcttgtctatgtctttgttgcatcattttgtttttcttgtaaggttcatatttagcatcgatttttgcttttttagcttgcatttcaatttgttttgattgaccaaaaattgttttaaatctaaatatgaaagaaattgtttttgttaaaataacaactactataatagcaaaaattgttgttcaaccatttaattctcaagtagattgagattctgacactcctaaaattattttagataatgggaaaacaatcaaagaataaaaaggtcctaattttcaagaatcagatcaaataacaataggattatttggtgtatccgatctaaaagctattccttcgaaattataataattattttcatttagtttataagcaaaagaataagtgttttttactggatcgatttgtgtgaatttagttggaattaaaattgtttttgcaagcgttgcataatcagttaaaacttgtattgcttcttttttaattgggtctgaactattatttaattcatttttaattttttcaaaatctacttcatttttataggattctaaagcattaatagaaggaataagttttgttttaaactcttctagattaatggttttgttatataaaaattgaattatgtctcttgaaaaagtaaagtatttttcatttgttggttcagcagtattgcttactgaataaaagaaatctccttgattaatcaacaaaggatttactgctaattgagttttttgaaactcttctgcatatttatcttttataaaatcaaaaaatttaggtgaaggtaatttaatatcagttcaattaaatttttgttgatatttttcttcttctgaatttaaaaataaaaactcttgatttttatcaccttttgcatattcaaaagtaccatcattattatgaaacattattaaagaactatattgtccataattgttggaagtgttaccatttgcttctgtttgttctcttaattgcttcaaaattgaagaatctttttcagaaattaggtaattattactttttgtagctttttgaatttttgtttctgtatcttttacactagcttcaaaaattgtatagtttggaattatatcttctttatttttgtaaaattctgtaccagaacctgaagatgttgaagttttaacaacaaaagactgaatacaccctgtcagtgttattccgaatatacagaaataaaaaattatttttaaaatctttaatattcttttaaaaatttgtttatttttatcttcgctttgtttatttccttgaaaataatcataagcactagctcttatttttttctgtttcatatactttctaattcgtttaatatattttttattttttgttcttttgttttaaaatctaagtttaaaaagttttttctagtaattattattatttgaaaattaactttaaaatcttttttttcttttaagtaattttgaacaattaccttgatttgtcttttgtagtgatttctttttacagcatttacaaattttttcggaattgaaattccaagttcaaactgaaaaaaatttttgtagtataaaataagatctttactaactatttgttgttttaaattaattatgttttggaattgtcagttttttcgaacttttttaaaatttaacattatttatcggatactgttaatctttttctacctttagctcttctagatgctaaaacttttctaccgtctgcggtttccattctagctctaaatccatgagttttaacatgttttaacttatttggttgatatgttcttttcattttagttcctttacttatttttgttattatgttgaattaaaataataccacaaaatataggtatttatatttagataagaagaaattttatcaaattttttagaaatttaaatttctctttac

What is claimed is:

1. A use of indocyanine green for resisting or sterilizing a bacterium, wherein the bacterium is a Gram-negative bacterium.

2. The use of claim 1, comprising irradiating the indocyanine green and/or the Gram-negative bacteria with near-infrared light.

3. The use of claim 2, wherein the near-infrared light has a wavelength of about 700 nm to about 1400 nm.

4. The use of claim 1, wherein the Gram-negative bacterium is free of a cell wall.

5. The use of claim 1, wherein the Gram-negative bacterium is a Mycoplasmatota.

6. The use of claim 5, wherein the Gram-negative bacterium is a Mollicutes.

7. The use of claim 6, wherein the Gram-negative bacterium is a Mycoplasmatales.

8. The use of claim 7, wherein the Gram-negative bacterium is a Mycoplasmataceae.

9. The use of claim 8, wherein the Gram-negative bacterium is a Mycoplasma.

10. The use of claim 1, comprising administering to a subject in need thereof or a cell in need thereof an effective amount of the indocyanine green.

11. The use of claim 10, wherein the effective amount is 5 μg/mL to 100 μg/mL.

12. The use of claim 10, wherein the indocyanine green enters the cell by assistance of OATP1B3 transport protein.

13. The use of claim 10, wherein the subject or the cell does not treated with an antibiotic.

14. The use of claim 10, further comprising administering an antibiotic to the subject or the cell.
